United States Patent Application Publication US 2026/0223846 A1, published August 6, 2026 (application 19/150,471).

The application's sequence listing, which the Patent Office published only in electronic form, follows.

SEQUENCE LISTING (5911 sequences)

SEQ ID NO: 1 - DNA, 27 bp, Eremothecium cymbalariae
  source 1..27: mol_type = other DNA; strain = DBVPG
tggcactggctgagatttgatcgtggt

SEQ ID NO: 2 - DNA, 36 bp, Eremothecium cymbalariae
  source 1..36: mol_type = other DNA; strain = DBVPG
tggcactggttgagattcgaccgtggtcaaccaatt

SEQ ID NO: 3 - DNA, 36 bp, Eremothecium cymbalariae
  source 1..36: mol_type = other DNA; strain = DBVPG
tggcactggttaagattctccaaaggtgaaccgttg

SEQ ID NO: 4 - DNA, 33 bp, Eremothecium cymbalariae
  source 1..33: mol_type = other DNA; strain = DBVPG
tggcactggttaagattctccaaaggtgaaccg

SEQ ID NO: 5 - DNA, 39 bp, Eremothecium cymbalariae
  source 1..39: mol_type = other DNA; strain = DBVPG
tggcattggctaagattcaaccgtggcgaacccatgtac

SEQ ID NO: 6 - DNA, 33 bp, Eremothecium cymbalariae
  source 1..33: mol_type = other DNA; strain = DBVPG
tggcattggctgagattcaaccgtggtgaaccc

SEQ ID NO: 7 - DNA, 39 bp, Saccharomyces cerevisiae
  source 1..39: mol_type = other DNA; strain = YJM993
tggcattggctgcaactaaagcctggccaaccaatgtac

SEQ ID NO: 8 - DNA, 39 bp, Saccharomyces cerevisiae
  source 1..39: mol_type = other DNA; strain = YJM993
tggcactggttaaatttgagaccaggccaaccaatgtac

SEQ ID NO: 9 - DNA, 39 bp, Saccharomyces cerevisiae
  source 1..39: mol_type = other DNA; strain = YJM993
tggcactggttgcaactcaagccaggccaaccaatgtac

SEQ ID NO: 10 - DNA, 39 bp, Saccharomyces cerevisiae
  source 1..39: mol_type = other DNA; strain = YJM1078
tggcactggttaaacttgagaccaggccaaccaatgtac

SEQ ID NO: 11 - DNA, 39 bp, Saccharomyces cerevisiae; identical to SEQ ID NO: 9
  source 1..39: mol_type = other DNA; strain = YJM1078

SEQ ID NO: 12 - DNA, 39 bp, Saccharomyces cerevisiae
  source 1..39: mol_type = other DNA; strain = YJM1078
tggcattggttgcagttaaaacccggccaaccaatgtac

SEQ ID NO: 13 - DNA, 39 bp, Saccharomyces cerevisiae; identical to SEQ ID NO: 8
  source 1..39: mol_type = other DNA; strain = YJM189

SEQ ID NO: 14 - DNA, 39 bp, Saccharomyces cerevisiae; identical to SEQ ID NO: 9
  source 1..39: mol_type = other DNA; strain = YJM189

SEQ ID NO: 15 - DNA, 39 bp, Saccharomyces cerevisiae; identical to SEQ ID NO: 8
  source 1..39: mol_type = other DNA; strain = YJM193

SEQ ID NO: 16 - DNA, 39 bp, Saccharomyces cerevisiae; identical to SEQ ID NO: 9
  source 1..39: mol_type = other DNA; strain = YJM193

SEQ ID NO: 17 - DNA, 39 bp, Saccharomyces cerevisiae; identical to SEQ ID NO: 10
  source 1..39: mol_type = other DNA; strain = YJM195

SEQ ID NO: 18 - DNA, 39 bp, Saccharomyces cerevisiae; identical to SEQ ID NO: 9
  source 1..39: mol_type = other DNA; strain = YJM195

SEQ ID NO: 19 - DNA, 39 bp, Saccharomyces cerevisiae; identical to SEQ ID NO: 10
  source 1..39: mol_type = other DNA; strain = YJM244

SEQ ID NO: 20 - DNA, 39 bp, Saccharomyces cerevisiae; identical to SEQ ID NO: 9
  source 1..39: mol_type = other DNA; strain = YJM244

SEQ ID NO: 21 - DNA, 39 bp, Saccharomyces cerevisiae; identical to SEQ ID NO: 10
  source 1..39: mol_type = other DNA; strain = YJM248

SEQ ID NO: 22 - DNA, 39 bp, Saccharomyces cerevisiae; identical to SEQ ID NO: 9
  source 1..39: mol_type = other DNA; strain = YJM248

SEQ ID NO: 23 - DNA, 39 bp, Saccharomyces cerevisiae; identical to SEQ ID NO: 8
  source 1..39: mol_type = other DNA; strain = YJM270

SEQ ID NO: 24 - DNA, 39 bp, Saccharomyces cerevisiae; identical to SEQ ID NO: 9
  source 1..39: mol_type = other DNA; strain = YJM270

SEQ ID NO: 25 - DNA, 39 bp, Saccharomyces cerevisiae; identical to SEQ ID NO: 8
  source 1..39: mol_type = other DNA; strain = YJM271

SEQ ID NO: 26 - DNA, 39 bp, Saccharomyces cerevisiae; identical to SEQ ID NO: 9
  source 1..39: mol_type = other DNA; strain = YJM271

SEQ ID NO: 27 - DNA, 39 bp, Saccharomyces cerevisiae; identical to SEQ ID NO: 8
  source 1..39: mol_type = other DNA; strain = YJM320

SEQ ID NO: 28 - DNA, 39 bp, Saccharomyces cerevisiae; identical to SEQ ID NO: 9
  source 1..39: mol_type = other DNA; strain = YJM320

SEQ ID NO: 29 - DNA, 39 bp, Saccharomyces cerevisiae; identical to SEQ ID NO: 8
  source 1..39: mol_type = other DNA; strain = YJM428

SEQ ID NO: 30 - DNA, 39 bp, Saccharomyces cerevisiae; identical to SEQ ID NO: 9
  source 1..39: mol_type = other DNA; strain = YJM428

SEQ ID NO: 31 - DNA, 39 bp, Saccharomyces cerevisiae; identical to SEQ ID NO: 10
  source 1..39: mol_type = other DNA; strain = YJM450

SEQ ID NO: 32 - DNA, 39 bp, Saccharomyces cerevisiae; identical to SEQ ID NO: 9
  source 1..39: mol_type = other DNA; strain = YJM450

SEQ ID NO: 33 - DNA, 39 bp, Saccharomyces cerevisiae; identical to SEQ ID NO: 10
  source 1..39: mol_type = other DNA; strain = YJM451

SEQ ID NO: 34 - DNA, 39 bp, Saccharomyces cerevisiae; identical to SEQ ID NO: 9
  source 1..39: mol_type = other DNA; strain = YJM451

SEQ ID NO: 35 - DNA, 39 bp, Saccharomyces cerevisiae; identical to SEQ ID NO: 8
  source 1..39: mol_type = other DNA; strain = YJM453

SEQ ID NO: 36 - DNA, 39 bp, Saccharomyces cerevisiae; identical to SEQ ID NO: 9
  source 1..39: mol_type = other DNA; strain = YJM453

SEQ ID NO: 37 - DNA, 39 bp, Saccharomyces cerevisiae; identical to SEQ ID NO: 10
  source 1..39: mol_type = other DNA; strain = YJM456

SEQ ID NO: 38 - DNA, 39 bp, Saccharomyces cerevisiae; identical to SEQ ID NO: 9
  source 1..39: mol_type = other DNA; strain = YJM456

SEQ ID NO: 39 - DNA, 39 bp, Saccharomyces cerevisiae; identical to SEQ ID NO: 10
  source 1..39: mol_type = other DNA; strain = YJM470

SEQ ID NO: 40 - DNA, 39 bp, Saccharomyces cerevisiae; identical to SEQ ID NO: 9
  source 1..39: mol_type = other DNA; strain = YJM470

SEQ ID NO: 41 - DNA, 39 bp, Saccharomyces cerevisiae; identical to SEQ ID NO: 8
  source 1..39: mol_type = other DNA; strain = YJM541

SEQ ID NO: 42 - DNA, 39 bp, Saccharomyces cerevisiae; identical to SEQ ID NO: 9
  source 1..39: mol_type = other DNA; strain = YJM541

SEQ ID NO: 43 - DNA, 39 bp, Saccharomyces cerevisiae; identical to SEQ ID NO: 10
  source 1..39: mol_type = other DNA; strain = YJM554

SEQ ID NO: 44 - DNA, 39 bp, Saccharomyces cerevisiae; identical to SEQ ID NO: 9
  source 1..39: mol_type = other DNA; strain = YJM554

SEQ ID NO: 45 - DNA, 39 bp, Saccharomyces cerevisiae; identical to SEQ ID NO: 10
  source 1..39: mol_type = other DNA; strain = YJM555

SEQ ID NO: 46 - DNA, 39 bp, Saccharomyces cerevisiae; identical to SEQ ID NO: 9
  source 1..39: mol_type = other DNA; strain = YJM555

SEQ ID NO: 47 - DNA, 39 bp, Saccharomyces cerevisiae; identical to SEQ ID NO: 10
  source 1..39: mol_type = other DNA; strain = YJM627

SEQ ID NO: 48 - DNA, 39 bp, Saccharomyces cerevisiae; identical to SEQ ID NO: 9
  source 1..39: mol_type = other DNA; strain = YJM627

SEQ ID NO: 49 - DNA, 39 bp, Saccharomyces cerevisiae; identical to SEQ ID NO: 8
  source 1..39: mol_type = other DNA; strain = YJM681

SEQ ID NO: 50 - DNA, 39 bp, Saccharomyces cerevisiae; identical to SEQ ID NO: 9
  source 1..39: mol_type = other DNA; strain = YJM681

SEQ ID NO: 51 - DNA, 39 bp, Saccharomyces cerevisiae; identical to SEQ ID NO: 10
  source 1..39: mol_type = other DNA; strain = YJM682

SEQ ID NO: 52 - DNA, 39 bp, Saccharomyces cerevisiae; identical to SEQ ID NO: 9
  source 1..39: mol_type = other DNA; strain = YJM682

SEQ ID NO: 53 - DNA, 39 bp, Saccharomyces cerevisiae; identical to SEQ ID NO: 8
  source 1..39: mol_type = other DNA; strain = YJM683

SEQ ID NO: 54 - DNA, 39 bp, Saccharomyces cerevisiae; identical to SEQ ID NO: 9
  source 1..39: mol_type = other DNA; strain = YJM683

SEQ ID NO: 55 - DNA, 39 bp, Saccharomyces cerevisiae; identical to SEQ ID NO: 10
  source 1..39: mol_type = other DNA; strain = YJM693

SEQ ID NO: 56 - DNA, 39 bp, Saccharomyces cerevisiae; identical to SEQ ID NO: 9
  source 1..39: mol_type = other DNA; strain = YJM693

SEQ ID NO: 57 - DNA, 39 bp, Saccharomyces cerevisiae; identical to SEQ ID NO: 8
  source 1..39: mol_type = other DNA; strain = YJM969

SEQ ID NO: 58 - DNA, 39 bp, Saccharomyces cerevisiae; identical to SEQ ID NO: 9
  source 1..39: mol_type = other DNA; strain = YJM969

SEQ ID NO: 59 - DNA, 39 bp, Saccharomyces cerevisiae; identical to SEQ ID NO: 8
  source 1..39: mol_type = other DNA; strain = YJM972

SEQ ID NO: 60 - DNA, 39 bp, Saccharomyces cerevisiae; identical to SEQ ID NO: 9
  source 1..39: mol_type = other DNA; strain = YJM972

SEQ ID NO: 61 - DNA, 39 bp, Saccharomyces cerevisiae; identical to SEQ ID NO: 8
  source 1..39: mol_type = other DNA; strain = YJM975

SEQ ID NO: 62 - DNA, 39 bp, Saccharomyces cerevisiae; identical to SEQ ID NO: 9
  source 1..39: mol_type = other DNA; strain = YJM975

SEQ ID NO: 63 - DNA, 39 bp, Saccharomyces cerevisiae; identical to SEQ ID NO: 8
  source 1..39: mol_type = other DNA; strain = YJM978

SEQ ID NO: 64 - DNA, 39 bp, Saccharomyces cerevisiae; identical to SEQ ID NO: 9
  source 1..39: mol_type = other DNA; strain = YJM978

SEQ ID NO: 65 - DNA, 39 bp, Saccharomyces cerevisiae; identical to SEQ ID NO: 8
  source 1..39: mol_type = other DNA; strain = YJM981

SEQ ID NO: 66 - DNA, 39 bp, Saccharomyces cerevisiae; identical to SEQ ID NO: 9
  source 1..39: mol_type = other DNA; strain = YJM981

SEQ ID NO: 67 - DNA, 39 bp, Saccharomyces cerevisiae; identical to SEQ ID NO: 8
  source 1..39: mol_type = other DNA; strain = YJM984

SEQ ID NO: 68 - DNA, 39 bp, Saccharomyces cerevisiae; identical to SEQ ID NO: 9
  source 1..39: mol_type = other DNA; strain = YJM984

SEQ ID NO: 69 - DNA, 39 bp, Saccharomyces cerevisiae; identical to SEQ ID NO: 8
  source 1..39: mol_type = other DNA; strain = YJM987

SEQ ID NO: 70 - DNA, 39 bp, Saccharomyces cerevisiae; identical to SEQ ID NO: 9
  source 1..39: mol_type = other DNA; strain = YJM987

SEQ ID NO: 71 - DNA, 39 bp, Saccharomyces cerevisiae; identical to SEQ ID NO: 8
  source 1..39: mol_type = other DNA; strain = YJM990

SEQ ID NO: 72 - DNA, 39 bp, Saccharomyces cerevisiae; identical to SEQ ID NO: 9
  source 1..39: mol_type = other DNA; strain = YJM990

SEQ ID NO: 73 - DNA, 39 bp, Saccharomyces cerevisiae; identical to SEQ ID NO: 8
  source 1..39: mol_type = other DNA; strain = YJM996

SEQ ID NO: 74 - DNA, 39 bp, Saccharomyces cerevisiae; identical to SEQ ID NO: 9
  source 1..39: mol_type = other DNA; strain = YJM996

SEQ ID NO: 75 - DNA, 39 bp, Saccharomyces cerevisiae; identical to SEQ ID NO: 8
  source 1..39: mol_type = other DNA; strain = YJM1083

SEQ ID NO: 76 - DNA, 39 bp, Saccharomyces cerevisiae; identical to SEQ ID NO: 9
  source 1..39: mol_type = other DNA; strain = YJM1083

SEQ ID NO: 77 - DNA, 39 bp, Saccharomyces cerevisiae; identical to SEQ ID NO: 8
  source 1..39: mol_type = other DNA; strain = YJM1129

SEQ ID NO: 78 - DNA, 39 bp, Saccharomyces cerevisiae; identical to SEQ ID NO: 9
  source 1..39: mol_type = other DNA; strain = YJM1129

SEQ ID NO: 79 - DNA, 39 bp, Saccharomyces cerevisiae; identical to SEQ ID NO: 8
  source 1..39: mol_type = other DNA; strain = YJM1133

SEQ ID NO: 80 - DNA, 39 bp, Saccharomyces cerevisiae; identical to SEQ ID NO: 9
  source 1..39: mol_type = other DNA; strain = YJM1133

SEQ ID NO: 81 - DNA, 39 bp, Saccharomyces cerevisiae; identical to SEQ ID NO: 10
  source 1..39: mol_type = other DNA; strain = YJM1190

SEQ ID NO: 82 - DNA, 39 bp, Saccharomyces cerevisiae; identical to SEQ ID NO: 9
  source 1..39: mol_type = other DNA; strain = YJM1190

SEQ ID NO: 83 - DNA, 39 bp, Saccharomyces cerevisiae; identical to SEQ ID NO: 8
  source 1..39: mol_type = other DNA; strain = YJM1199

SEQ ID NO: 84 - DNA, 39 bp, Saccharomyces cerevisiae; identical to SEQ ID NO: 9
  source 1..39: mol_type = other DNA; strain = YJM1199

SEQ ID NO: 85 - DNA, 39 bp, Saccharomyces cerevisiae; identical to SEQ ID NO: 8
  source 1..39: mol_type = other DNA; strain = YJM1202

SEQ ID NO: 86 - DNA, 39 bp, Saccharomyces cerevisiae; identical to SEQ ID NO: 9
  source 1..39: mol_type = other DNA; strain = YJM1202

SEQ ID NO: 87 - DNA, 39 bp, Saccharomyces cerevisiae; identical to SEQ ID NO: 10
  source 1..39: mol_type = other DNA; strain = YJM1208

SEQ ID NO: 88 - DNA, 39 bp, Saccharomyces cerevisiae; identical to SEQ ID NO: 9
  source 1..39: mol_type = other DNA; strain = YJM1208

SEQ ID NO: 89 - DNA, 39 bp, Saccharomyces cerevisiae; identical to SEQ ID NO: 8
  source 1..39: mol_type = other DNA; strain = YJM1244

SEQ ID NO: 90 - DNA, 39 bp, Saccharomyces cerevisiae; identical to SEQ ID NO: 9
  source 1..39: mol_type = other DNA; strain = YJM1244

SEQ ID NO: 91 - DNA, 39 bp, Saccharomyces cerevisiae; identical to SEQ ID NO: 10
  source 1..39: mol_type = other DNA; strain = YJM1248

SEQ ID NO: 92 - DNA, 39 bp, Saccharomyces cerevisiae; identical to SEQ ID NO: 9
  source 1..39: mol_type = other DNA; strain = YJM1248

SEQ ID NO: 93 - DNA, 39 bp, Saccharomyces cerevisiae; identical to SEQ ID NO: 8
  source 1..39: mol_type = other DNA; strain = YJM1250

SEQ ID NO: 94 - DNA, 39 bp, Saccharomyces cerevisiae; identical to SEQ ID NO: 9
  source 1..39: mol_type = other DNA; strain = YJM1250

SEQ ID NO: 95 - DNA, 39 bp, Saccharomyces cerevisiae; identical to SEQ ID NO: 10
  source 1..39: mol_type = other DNA; strain = YJM1252

SEQ ID NO: 96 - DNA, 39 bp, Saccharomyces cerevisiae; identical to SEQ ID NO: 9
  source 1..39: mol_type = other DNA; strain = YJM1252

SEQ ID NO: 97 - DNA, 39 bp, Saccharomyces cerevisiae; identical to SEQ ID NO: 8
  source 1..39: mol_type = other DNA; strain = YJM1415

SEQ ID NO: 98 - DNA, 39 bp, Saccharomyces cerevisiae; identical to SEQ ID NO: 9
  source 1..39: mol_type = other DNA; strain = YJM1415

SEQ ID NO: 99 - DNA, 39 bp, Saccharomyces cerevisiae; identical to SEQ ID NO: 8
  source 1..39: mol_type = other DNA; strain = YJM1417

SEQ ID NO: 100 - DNA, 39 bp, Saccharomyces cerevisiae; identical to SEQ ID NO: 9
  source 1..39: mol_type = other DNA; strain = YJM1417

SEQ ID NO: 101 - DNA, 39 bp, Saccharomyces cerevisiae
  source 1..39: mol_type = other DNA; strain = YJM1418
tggcactggctaaacttgagaccaggccaaccaatgtac

SEQ ID NO: 102 - DNA, 39 bp, Saccharomyces cerevisiae; identical to SEQ ID NO: 9
  source 1..39: mol_type = other DNA; strain = YJM1418

SEQ ID NO: 103 - DNA, 39 bp, Saccharomyces cerevisiae; identical to SEQ ID NO: 10
  source 1..39: mol_type = other DNA; strain = YJM1419

SEQ ID NO: 104 - DNA, 39 bp, Saccharomyces cerevisiae; identical to SEQ ID NO: 9
  source 1..39: mol_type = other DNA; strain = YJM1419

SEQ ID NO: 105 - DNA, 39 bp, Saccharomyces cerevisiae; identical to SEQ ID NO: 10
  source 1..39: mol_type = other DNA; strain = YJM1433

SEQ ID NO: 106 - DNA, 39 bp, Saccharomyces cerevisiae; identical to SEQ ID NO: 9
  source 1..39: mol_type = other DNA; strain = YJM1433

SEQ ID NO: 107 - DNA, 39 bp, Saccharomyces cerevisiae; identical to SEQ ID NO: 10
  source 1..39: mol_type = other DNA; strain = YJM1434

SEQ ID NO: 108 - DNA, 39 bp, Saccharomyces cerevisiae; identical to SEQ ID NO: 9
  source 1..39: mol_type = other DNA; strain = YJM1434

SEQ ID NO: 109 - DNA, 39 bp, Saccharomyces cerevisiae; identical to SEQ ID NO: 10
  source 1..39: mol_type = other DNA; strain = YJM1439

SEQ ID NO: 110 - DNA, 39 bp, Saccharomyces cerevisiae; identical to SEQ ID NO: 9
  source 1..39: mol_type = other DNA; strain = YJM1439

SEQ ID NO: 111 - DNA, 39 bp, Saccharomyces cerevisiae; identical to SEQ ID NO: 8
  source 1..39: mol_type = other DNA; strain = YJM1443

SEQ ID NO: 112 - DNA, 39 bp, Saccharomyces cerevisiae; identical to SEQ ID NO: 9
  source 1..39: mol_type = other DNA; strain = YJM1443

SEQ ID NO: 113 - DNA, 39 bp, Saccharomyces cerevisiae; identical to SEQ ID NO: 10
  source 1..39: mol_type = other DNA; strain = YJM1444

SEQ ID NO: 114 - DNA, 39 bp, Saccharomyces cerevisiae; identical to SEQ ID NO: 9
  source 1..39: mol_type = other DNA; strain = YJM1444

SEQ ID NO: 115 - DNA, 39 bp, Saccharomyces cerevisiae; identical to SEQ ID NO: 10
  source 1..39: mol_type = other DNA; strain = YJM1450

SEQ ID NO: 116 - DNA, 39 bp, Saccharomyces cerevisiae; identical to SEQ ID NO: 9
  source 1..39: mol_type = other DNA; strain = YJM1450

SEQ ID NO: 117 - DNA, 39 bp, Saccharomyces cerevisiae; identical to SEQ ID NO: 10
  source 1..39: mol_type = other DNA; strain = YJM1460

SEQ ID NO: 118 - DNA, 39 bp, Saccharomyces cerevisiae; identical to SEQ ID NO: 9
  source 1..39: mol_type = other DNA; strain = YJM1460

SEQ ID NO: 119 - DNA, 39 bp, Saccharomyces cerevisiae; identical to SEQ ID NO: 8
  source 1..39: mol_type = other DNA; strain = YJM1463

SEQ ID NO: 120 - DNA, 39 bp, Saccharomyces cerevisiae; identical to SEQ ID NO: 9
  source 1..39: mol_type = other DNA; strain = YJM1463

SEQ ID NO: 121 - DNA, 39 bp, Saccharomyces cerevisiae; identical to SEQ ID NO: 10
  source 1..39: mol_type = other DNA; strain = YJM1477

SEQ ID NO: 122 - DNA, 39 bp, Saccharomyces cerevisiae; identical to SEQ ID NO: 9
  source 1..39: mol_type = other DNA; strain = YJM1477

SEQ ID NO: 123 - DNA, 39 bp, Saccharomyces cerevisiae; identical to SEQ ID NO: 8
  source 1..39: mol_type = other DNA; strain = YJM1478

SEQ ID NO: 124 - DNA, 39 bp, Saccharomyces cerevisiae; identical to SEQ ID NO: 9
  source 1..39: mol_type = other DNA; strain = YJM1478

SEQ ID NO: 125 - DNA, 39 bp, Saccharomyces cerevisiae; identical to SEQ ID NO: 10
  source 1..39: mol_type = other DNA; strain = YJM1479

SEQ ID NO: 126 - DNA, 39 bp, Saccharomyces cerevisiae; identical to SEQ ID NO: 9
  source 1..39: mol_type = other DNA; strain = YJM1479

SEQ ID NO: 127 - DNA, 39 bp, Saccharomyces cerevisiae; identical to SEQ ID NO: 8
  source 1..39: mol_type = other DNA; strain = YJM1526

SEQ ID NO: 128 - DNA, 39 bp, Saccharomyces cerevisiae; identical to SEQ ID NO: 9
  source 1..39: mol_type = other DNA; strain = YJM1526

SEQ ID NO: 129 - DNA, 39 bp, Saccharomyces cerevisiae; identical to SEQ ID NO: 8
  source 1..39: mol_type = other DNA; strain = YJM1527

SEQ ID NO: 130 - DNA, 39 bp, Saccharomyces cerevisiae; identical to SEQ ID NO: 9
  source 1..39: mol_type = other DNA; strain = YJM1527

SEQ ID NO: 131 - DNA, 39 bp, Saccharomyces cerevisiae; identical to SEQ ID NO: 8
  source 1..39: mol_type = other DNA; strain = YJM1549

SEQ ID NO: 132 - DNA, 39 bp, Saccharomyces cerevisiae; identical to SEQ ID NO: 9
  source 1..39: mol_type = other DNA; strain = YJM1549

SEQ ID NO: 133 - DNA, 39 bp, Saccharomyces cerevisiae; identical to SEQ ID NO: 10
  source 1..39: mol_type = other DNA; strain = YJM1573

SEQ ID NO: 134 - DNA, 39 bp, Saccharomyces cerevisiae; identical to SEQ ID NO: 9
  source 1..39: mol_type = other DNA; strain = YJM1573

SEQ ID NO: 135 - DNA, 39 bp, Saccharomyces cerevisiae; identical to SEQ ID NO: 8
  source 1..39: mol_type = other DNA; strain = YJM1574

SEQ ID NO: 136 - DNA, 39 bp, Saccharomyces cerevisiae; identical to SEQ ID NO: 9
  source 1..39: mol_type = other DNA; strain = YJM1574

SEQ ID NO: 137 - DNA, 39 bp, Saccharomyces cerevisiae; identical to SEQ ID NO: 10
  source 1..39: mol_type = other DNA; strain = YJM1592

SEQ ID NO: 138 - DNA, 39 bp, Saccharomyces cerevisiae; identical to SEQ ID NO: 9
  source 1..39: mol_type = other DNA; strain = YJM1592

SEQ ID NO: 139 - DNA, 39 bp, Saccharomyces cerevisiae; identical to SEQ ID NO: 10
  source 1..39: mol_type = other DNA; strain = YJM1273

SEQ ID NO: 140 - DNA, 39 bp, Saccharomyces cerevisiae; identical to SEQ ID NO: 9
  source 1..39: mol_type = other DNA; strain = YJM1273

SEQ ID NO: 141 - DNA, 39 bp, Saccharomyces cerevisiae; identical to SEQ ID NO: 10
  source 1..39: mol_type = other DNA; strain = YJM1307

SEQ ID NO: 142 - DNA, 39 bp, Saccharomyces cerevisiae; identical to SEQ ID NO: 9
  source 1..39: mol_type = other DNA; strain = YJM1307

SEQ ID NO: 143 - DNA, 39 bp, Saccharomyces cerevisiae; identical to SEQ ID NO: 8
  source 1..39: mol_type = other DNA; strain = YJM1311

SEQ ID NO: 144 - DNA, 39 bp, Saccharomyces cerevisiae; identical to SEQ ID NO: 9
  source 1..39: mol_type = other DNA; strain = YJM1311

SEQ ID NO: 145 - DNA, 39 bp, Saccharomyces cerevisiae; identical to SEQ ID NO: 10
  source 1..39: mol_type = other DNA; strain = YJM1326

SEQ ID NO: 146 - DNA, 39 bp, Saccharomyces cerevisiae; identical to SEQ ID NO: 9
  source 1..39: mol_type = other DNA; strain = YJM1326

SEQ ID NO: 147 - DNA, 39 bp, Saccharomyces cerevisiae; identical to SEQ ID NO: 10
  source 1..39: mol_type = other DNA; strain = YJM1332

SEQ ID NO: 148 - DNA, 39 bp, Saccharomyces cerevisiae; identical to SEQ ID NO: 9
  source 1..39: mol_type = other DNA; strain = YJM1332

SEQ ID NO: 149 - DNA, 39 bp, Saccharomyces cerevisiae; identical to SEQ ID NO: 8
  source 1..39: mol_type = other DNA; strain = YJM1336

SEQ ID NO: 150 - DNA, 39 bp, Saccharomyces cerevisiae; identical to SEQ ID NO: 9
  source 1..39: mol_type = other DNA; strain = YJM1336

SEQ ID NO: 151 - DNA, 39 bp, Saccharomyces cerevisiae; identical to SEQ ID NO: 8
  source 1..39: mol_type = other DNA; strain = YJM1338

SEQ ID NO: 152 - DNA, 39 bp, Saccharomyces cerevisiae; identical to SEQ ID NO: 9
  source 1..39: mol_type = other DNA; strain = YJM1338

SEQ ID NO: 153 - DNA, 39 bp, Saccharomyces cerevisiae; identical to SEQ ID NO: 8
  source 1..39: mol_type = other DNA; strain = YJM1341

SEQ ID NO: 154 - DNA, 39 bp, Saccharomyces cerevisiae; identical to SEQ ID NO: 9
  source 1..39: mol_type = other DNA; strain = YJM1341

SEQ ID NO: 155 - DNA, 39 bp, Saccharomyces cerevisiae; identical to SEQ ID NO: 10
  source 1..39: mol_type = other DNA; strain = YJM1342

SEQ ID NO: 156 - DNA, 39 bp, Saccharomyces cerevisiae; identical to SEQ ID NO: 9
  source 1..39: mol_type = other DNA; strain = YJM1342

SEQ ID NO: 157 - DNA, 39 bp, Saccharomyces cerevisiae; identical to SEQ ID NO: 10
  source 1..39: mol_type = other DNA; strain = YJM1355

SEQ ID NO: 158 - DNA, 39 bp, Saccharomyces cerevisiae; identical to SEQ ID NO: 9
  source 1..39: mol_type = other DNA; strain = YJM1355

SEQ ID NO: 159 - DNA, 39 bp, Saccharomyces cerevisiae; identical to SEQ ID NO: 8
  source 1..39: mol_type = other DNA; strain = YJM1356

SEQ ID NO: 160 - DNA, 39 bp, Saccharomyces cerevisiae; identical to SEQ ID NO: 9
  source 1..39: mol_type = other DNA; strain = YJM1356

SEQ ID NO: 161 - DNA, 39 bp, Saccharomyces cerevisiae; identical to SEQ ID NO: 8
  source 1..39: mol_type = other DNA; strain = YJM1381

SEQ ID NO: 162 - DNA, 39 bp, Saccharomyces cerevisiae; identical to SEQ ID NO: 9
  source 1..39: mol_type = other DNA; strain = YJM1381

SEQ ID NO: 163 - DNA, 39 bp, Saccharomyces cerevisiae; identical to SEQ ID NO: 8
  source 1..39: mol_type = other DNA; strain = YJM1383

SEQ ID NO: 164 - DNA, 39 bp, Saccharomyces cerevisiae; identical to SEQ ID NO: 9
  source 1..39: mol_type = other DNA; strain = YJM1383

SEQ ID NO: 165 - DNA, 39 bp, Saccharomyces cerevisiae; identical to SEQ ID NO: 10
  source 1..39: mol_type = other DNA; strain = YJM1385

SEQ ID NO: 166 - DNA, 39 bp, Saccharomyces cerevisiae; identical to SEQ ID NO: 9
  source 1..39: mol_type = other DNA; strain = YJM1385

SEQ ID NO: 167 - DNA, 39 bp, Saccharomyces cerevisiae; identical to SEQ ID NO: 8
  source 1..39: mol_type = other DNA; strain = YJM1386

SEQ ID NO: 168 - DNA, 39 bp, Saccharomyces cerevisiae; identical to SEQ ID NO: 9
  source 1..39: mol_type = other DNA; strain = YJM1386

SEQ ID NO: 169 - DNA, 39 bp, Saccharomyces cerevisiae; identical to SEQ ID NO: 8
  source 1..39: mol_type = other DNA; strain = YJM1387

SEQ ID NO: 170 - DNA, 39 bp, Saccharomyces cerevisiae; identical to SEQ ID NO: 9
  source 1..39: mol_type = other DNA; strain = YJM1387

SEQ ID NO: 171 - DNA, 39 bp, Saccharomyces cerevisiae; identical to SEQ ID NO: 10
  source 1..39: mol_type = other DNA; strain = YJM1388

SEQ ID NO: 172 - DNA, 39 bp, Saccharomyces cerevisiae; identical to SEQ ID NO: 9
  source 1..39: mol_type = other DNA; strain = YJM1388

SEQ ID NO: 173 - DNA, 39 bp, Saccharomyces cerevisiae; identical to SEQ ID NO: 10
  source 1..39: mol_type = other DNA; strain = YJM1389

SEQ ID NO: 174 - DNA, 39 bp, Saccharomyces cerevisiae; identical to SEQ ID NO: 9
  source 1..39: mol_type = other DNA; strain = YJM1389

SEQ ID NO: 175 - DNA, 39 bp, Saccharomyces cerevisiae; identical to SEQ ID NO: 10
  source 1..39: mol_type = other DNA; strain = YJM1399

SEQ ID NO: 176 - DNA, 39 bp, Saccharomyces cerevisiae; identical to SEQ ID NO: 9
  source 1..39: mol_type = other DNA; strain = YJM1399

SEQ ID NO: 177 - DNA, 39 bp, Saccharomyces cerevisiae; identical to SEQ ID NO: 10
  source 1..39: mol_type = other DNA; strain = YJM1400

SEQ ID NO: 178 - DNA, 39 bp, Saccharomyces cerevisiae; identical to SEQ ID NO: 9
  source 1..39: mol_type = other DNA; strain = YJM1400

SEQ ID NO: 179 - DNA, 39 bp, Saccharomyces cerevisiae; identical to SEQ ID NO: 10
  source 1..39: mol_type = other DNA; strain = YJM1401

SEQ ID NO: 180 - DNA, 39 bp, Saccharomyces cerevisiae; identical to SEQ ID NO: 9
  source 1..39: mol_type = other DNA; strain = YJM1401

SEQ ID NO: 181 - DNA, 39 bp, Saccharomyces cerevisiae; identical to SEQ ID NO: 10
  source 1..39: mol_type = other DNA; strain = YJM1402

SEQ ID NO: 182 - DNA, 39 bp, Saccharomyces cerevisiae; identical to SEQ ID NO: 9
  source 1..39: mol_type = other DNA; strain = YJM1402

SEQ ID NO: 183 - DNA, 39 bp, Saccharomyces cerevisiae; identical to SEQ ID NO: 7
  source 1..39: mol_type = other DNA; strain = YJM1526

SEQ ID NO: 184 - DNA, 39 bp, Saccharomyces cerevisiae; identical to SEQ ID NO: 7
  source 1..39: mol_type = other DNA; strain = YJM1549

SEQ ID NO: 185 - DNA, 39 bp, Saccharomyces cerevisiae
  source 1..39: mol_type = other DNA; strain = YJM1574
tggcattggttgcaactaaaacctggccaaccaatgtac

SEQ ID NO: 186 - DNA, 39 bp, Saccharomyces cerevisiae; identical to SEQ ID NO: 7
  source 1..39: mol_type = other DNA; strain = YJM189

SEQ ID NO: 187 - DNA, 39 bp, Saccharomyces cerevisiae; identical to SEQ ID NO: 12
  source 1..39: mol_type = other DNA; strain = YJM969

SEQ ID NO: 188 - DNA, 39 bp, Saccharomyces cerevisiae; identical to SEQ ID NO: 12
  source 1..39: mol_type = other DNA; strain = YJM972

SEQ ID NO: 189 - DNA, 39 bp, Saccharomyces cerevisiae; identical to SEQ ID NO: 185
  source 1..39: mol_type = other DNA; strain = YJM978

SEQ ID NO: 190 - DNA, 39 bp, Saccharomyces cerevisiae; identical to SEQ ID NO: 185
  source 1..39: mol_type = other DNA; strain = YJM981

SEQ ID NO: 191 - DNA, 39 bp, Saccharomyces cerevisiae; identical to SEQ ID NO: 7
  source 1..39: mol_type = other DNA; strain = YJM987

SEQ ID NO: 192 - DNA, 39 bp, Saccharomyces cerevisiae; identical to SEQ ID NO: 7
  source 1..39: mol_type = other DNA; strain = YJM996

SEQ ID NO: 193 - DNA, 39 bp, Saccharomyces cerevisiae; identical to SEQ ID NO: 7
  source 1..39: mol_type = other DNA; strain = YJM1129

SEQ ID NO: 194 - DNA, 39 bp, Saccharomyces cerevisiae
  source 1..39: mol_type = other DNA; strain = YJM1460
tggcattggttgcaactaaagcctggccaaccaatgtac

SEQ ID NO: 195 - DNA, 39 bp, Saccharomyces cerevisiae; identical to SEQ ID NO: 7
  source 1..39: mol_type = other DNA; strain = YJM1463

SEQ ID NO: 196 - DNA, 39 bp, Saccharomyces cerevisiae; identical to SEQ ID NO: 7
  source 1..39: mol_type = other DNA; strain = YJM1477

SEQ ID NO: 197 - DNA, 39 bp, Saccharomyces cerevisiae; identical to SEQ ID NO: 7
  source 1..39: mol_type = other DNA; strain = YJM1478

SEQ ID NO: 198 - DNA, 39 bp, Saccharomyces cerevisiae; identical to SEQ ID NO: 194
  source 1..39: mol_type = other DNA; strain = YJM1479

SEQ ID NO: 199 - DNA, 39 bp, Saccharomyces cerevisiae; identical to SEQ ID NO: 194
  source 1..39: mol_type = other DNA; strain = YJM1527

SEQ ID NO: 200 - DNA, 39 bp, Saccharomyces cerevisiae; identical to SEQ ID NO: 194
  source 1..39: mol_type = other DNA; strain = YJM1573

SEQ ID NO: 201 - DNA, 39 bp, Saccharomyces cerevisiae; identical to SEQ ID NO: 12
  source 1..39: mol_type = other DNA; strain = YJM1592

SEQ ID NO: 202 - DNA, 39 bp, Saccharomyces cerevisiae
  source 1..39: mol_type = other DNA; strain = YJM1592
tggcattggttgcgactaaagcctggccaaccaatgtac

SEQ ID NO: 203 - DNA, 39 bp, Saccharomyces cerevisiae; identical to SEQ ID NO: 12
  source 1..39: mol_type = other DNA; strain = YJM1615

SEQ ID NO: 204 - DNA, 39 bp, Saccharomyces cerevisiae; identical to SEQ ID NO: 185
  source 1..39: mol_type = other DNA; strain = YJM193

SEQ ID NO: 205 - DNA, 39 bp, Saccharomyces cerevisiae; identical to SEQ ID NO: 194
  source 1..39: mol_type = other DNA; strain = YJM195

SEQ ID NO: 206 - DNA, 39 bp, Saccharomyces cerevisiae; identical to SEQ ID NO: 185
  source 1..39: mol_type = other DNA; strain = YJM244

SEQ ID NO: 207 - DNA, 39 bp, Saccharomyces cerevisiae; identical to SEQ ID NO: 7
  source 1..39: mol_type = other DNA; strain = YJM248

SEQ ID NO: 208 - DNA, 39 bp, Saccharomyces cerevisiae; identical to SEQ ID NO: 12
  source 1..39: mol_type = other DNA; strain = YJM270

SEQ ID NO: 209 - DNA, 39 bp, Saccharomyces cerevisiae; identical to SEQ ID NO: 7
  source 1..39: mol_type = other DNA; strain = YJM271

SEQ ID NO: 210 - DNA, 39 bp, Saccharomyces cerevisiae; identical to SEQ ID NO: 194
  source 1..39: mol_type = other DNA; strain = YJM320

SEQ ID NO: 211 - DNA, 39 bp, Saccharomyces cerevisiae; identical to SEQ ID NO: 194
  source 1..39: mol_type = other DNA; strain = YJM326

SEQ ID NO: 212 - DNA, 39 bp, Saccharomyces cerevisiae; identical to SEQ ID NO: 7
  source 1..39: mol_type = other DNA; strain = YJM428

SEQ ID NO: 213 - DNA, 39 bp, Saccharomyces cerevisiae
  source 1..39: mol_type = other DNA; strain = YJM450
tggcattggttgcagttaaaacccggtcaaccaatgtac

SEQ ID NO: 214 - DNA, 39 bp, Saccharomyces cerevisiae; identical to SEQ ID NO: 7
  source 1..39: mol_type = other DNA; strain = YJM1356

SEQ ID NO: 215 - DNA, 39 bp, Saccharomyces cerevisiae; identical to SEQ ID NO: 185
  source 1..39: mol_type = other DNA; strain = YJM1381

SEQ ID NO: 216 - DNA, 39 bp, Saccharomyces cerevisiae; identical to SEQ ID NO: 185
  source 1..39: mol_type = other DNA; strain = YJM1383

SEQ ID NO: 217 - DNA, 39 bp, Saccharomyces cerevisiae; identical to SEQ ID NO: 12
  source 1..39: mol_type = other DNA; strain = YJM1385

SEQ ID NO: 218 - DNA, 39 bp, Saccharomyces cerevisiae; identical to SEQ ID NO: 7
  source 1..39: mol_type = other DNA; strain = YJM1386

SEQ ID NO: 219 - DNA, 39 bp, Saccharomyces cerevisiae; identical to SEQ ID NO: 7
  source 1..39: mol_type = other DNA; strain = YJM1387

SEQ ID NO: 220 - DNA, 39 bp, Saccharomyces cerevisiae; identical to SEQ ID NO: 185
  source 1..39: mol_type = other DNA; strain = YJM1388

SEQ ID NO: 221 - DNA, 39 bp, Saccharomyces cerevisiae; identical to SEQ ID NO: 7
  source 1..39: mol_type = other DNA; strain = YJM1389

SEQ ID NO: 222 - DNA, 39 bp, Saccharomyces cerevisiae; identical to SEQ ID NO: 202
  source 1..39: mol_type = other DNA; strain = YJM1389

SEQ ID NO: 223 - DNA, 39 bp, Saccharomyces cerevisiae; identical to SEQ ID NO: 185
  source 1..39: mol_type = other DNA; strain = YJM1399

SEQ ID NO: 224 - DNA, 39 bp, Saccharomyces cerevisiae; identical to SEQ ID NO: 7
  source 1..39: mol_type = other DNA; strain = YJM1400

SEQ ID NO: 225 - DNA, 39 bp, Saccharomyces cerevisiae; identical to SEQ ID NO: 12
  source 1..39: mol_type = other DNA; strain = YJM1401

SEQ ID NO: 226 - DNA, 39 bp, Saccharomyces cerevisiae; identical to SEQ ID NO: 185
  source 1..39: mol_type = other DNA; strain = YJM1402

SEQ ID NO: 227 - DNA, 39 bp, Saccharomyces cerevisiae; identical to SEQ ID NO: 185
  source 1..39: mol_type = other DNA; strain = YJM1415

SEQ ID NO: 228 - DNA, 39 bp, Saccharomyces cerevisiae; identical to SEQ ID NO: 12
  source 1..39: mol_type = other DNA; strain = YJM1417

SEQ ID NO: 229 - DNA, 39 bp, Saccharomyces cerevisiae; identical to SEQ ID NO: 194
  source 1..39: mol_type = other DNA; strain = YJM1418

SEQ ID NO: 230 - DNA, 39 bp, Saccharomyces cerevisiae; identical to SEQ ID NO: 194
  source 1..39: mol_type = other DNA; strain = YJM1419

SEQ ID NO: 231 - DNA, 39 bp, Saccharomyces cerevisiae; identical to SEQ ID NO: 185
  source 1..39: mol_type = other DNA; strain = YJM1433

SEQ ID NO: 232 - DNA, 39 bp, Saccharomyces cerevisiae; identical to SEQ ID NO: 185
  source 1..39: mol_type = other DNA; strain = YJM1434

SEQ ID NO: 233 - DNA, 39 bp, Saccharomyces cerevisiae; identical to SEQ ID NO: 194
  source 1..39: mol_type = other DNA; strain = YJM1439

SEQ ID NO: 234 - DNA, 39 bp, Saccharomyces cerevisiae; identical to SEQ ID NO: 194
  source 1..39: mol_type = other DNA; strain = YJM1443

SEQ ID NO: 235 - DNA, 39 bp, Saccharomyces cerevisiae; identical to SEQ ID NO: 185
  source 1..39: mol_type = other DNA; strain = YJM1444

SEQ ID NO: 236 - DNA, 39 bp, Saccharomyces cerevisiae; identical to SEQ ID NO: 194
  source 1..39: mol_type = other DNA; strain = YJM1447

SEQ ID NO: 237 - DNA, 39 bp, Saccharomyces cerevisiae; identical to SEQ ID NO: 12
  source 1..39: mol_type = other DNA; strain = YJM1450

SEQ ID NO: 238 - DNA, 39 bp, Saccharomyces cerevisiae; identical to SEQ ID NO: 12
  source 1..39: mol_type = other DNA; strain = YJM1083

SEQ ID NO: 239 - DNA, 39 bp, Saccharomyces cerevisiae; identical to SEQ ID NO: 185
  source 1..39: mol_type = other DNA; strain = YJM1133

SEQ ID NO: 240 - DNA, 39 bp, Saccharomyces cerevisiae; identical to SEQ ID NO: 12
  source 1..39: mol_type = other DNA; strain = YJM1190

SEQ ID NO: 241 - DNA, 39 bp, Saccharomyces cerevisiae; identical to SEQ ID NO: 12
  source 1..39: mol_type = other DNA; strain = YJM1199

SEQ ID NO: 242 - DNA, 39 bp, Saccharomyces cerevisiae; identical to SEQ ID NO: 194
  source 1..39: mol_type = other DNA; strain = YJM1202

SEQ ID NO: 243 - DNA, 39 bp, Saccharomyces cerevisiae; identical to SEQ ID NO: 185
  source 1..39: mol_type = other DNA; strain = YJM1208

SEQ ID NO: 244 - DNA, 39 bp, Saccharomyces cerevisiae; identical to SEQ ID NO: 7
  source 1..39: mol_type = other DNA; strain = YJM1242

SEQ ID NO: 245 - DNA, 39 bp, Saccharomyces cerevisiae; identical to SEQ ID NO: 7
  source 1..39: mol_type = other DNA; strain = YJM1244

SEQ ID NO: 246 - DNA, 39 bp, Saccharomyces cerevisiae; identical to SEQ ID NO: 194
  source 1..39: mol_type = other DNA; strain = YJM1248

SEQ ID NO: 247 - DNA, 39 bp, Saccharomyces cerevisiae; identical to SEQ ID NO: 7
  source 1..39: mol_type = other DNA; strain = YJM1250

SEQ ID NO: 248 - DNA, 39 bp, Saccharomyces cerevisiae; identical to SEQ ID NO: 12
  source 1..39: mol_type = other DNA; strain = YJM1252

SEQ ID NO: 249 - DNA, 39 bp, Saccharomyces cerevisiae; identical to SEQ ID NO: 12
  source 1..39: mol_type = other DNA; strain = YJM1273

SEQ ID NO: 250 - DNA, 39 bp, Saccharomyces cerevisiae; identical to SEQ ID NO: 7
  source 1..39: mol_type = other DNA; strain = YJM1304

SEQ ID NO: 251 - DNA, 39 bp, Saccharomyces cerevisiae; identical to SEQ ID NO: 7
  source 1..39: mol_type = other DNA; strain = YJM1307

SEQ ID NO: 252 - DNA, 39 bp, Saccharomyces cerevisiae; identical to SEQ ID NO: 12
  source 1..39: mol_type = other DNA; strain = YJM1311

SEQ ID NO: 253 - DNA, 39 bp, Saccharomyces cerevisiae; identical to SEQ ID NO: 12
  source 1..39: mol_type = other DNA; strain = YJM1326

SEQ ID NO: 254 - DNA, 39 bp, Saccharomyces cerevisiae; identical to SEQ ID NO: 185
  source 1..39: mol_type = other DNA; strain = YJM1332

SEQ ID NO: 255 - DNA, 39 bp, Saccharomyces cerevisiae; identical to SEQ ID NO: 12
  source 1..39: mol_type = other DNA; strain = YJM1336

SEQ ID NO: 256 - DNA, 39 bp, Saccharomyces cerevisiae; identical to SEQ ID NO: 7
  source 1..39: mol_type = other DNA; strain = YJM1338

SEQ ID NO: 257 - DNA, 39 bp, Saccharomyces cerevisiae; identical to SEQ ID NO: 7
  source 1..39: mol_type = other DNA; strain = YJM1341

SEQ ID NO: 258 - DNA, 39 bp, Saccharomyces cerevisiae; identical to SEQ ID NO: 185
  source 1..39: mol_type = other DNA; strain = YJM1342

SEQ ID NO: 259 - DNA, 39 bp, Saccharomyces cerevisiae; identical to SEQ ID NO: 194
  source 1..39: mol_type = other DNA; strain = YJM1355

SEQ ID NO: 260 - DNA, 39 bp, Saccharomyces cerevisiae; identical to SEQ ID NO: 7
  source 1..39: mol_type = other DNA; strain = YJM451

SEQ ID NO: 261 - DNA, 39 bp, Saccharomyces cerevisiae; identical to SEQ ID NO: 12
  source 1..39: mol_type = other DNA; strain = YJM453

SEQ ID NO: 262 - DNA, 39 bp, Saccharomyces cerevisiae; identical to SEQ ID NO: 185
  source 1..39: mol_type = other DNA; strain = YJM456

SEQ ID NO: 263 - DNA, 39 bp, Saccharomyces cerevisiae; identical to SEQ ID NO: 12
  source 1..39: mol_type = other DNA; strain = YJM470

SEQ ID NO: 264 - DNA, 39 bp, Saccharomyces cerevisiae; identical to SEQ ID NO: 194
  source 1..39: mol_type = other DNA; strain = YJM541

SEQ ID NO: 265 - DNA, 39 bp, Saccharomyces cerevisiae; identical to SEQ ID NO: 194
  source 1..39: mol_type = other DNA; strain = YJM554

SEQ ID NO: 266 - DNA, 39 bp, Saccharomyces cerevisiae; identical to SEQ ID NO: 194
  source 1..39: mol_type = other DNA; strain = YJM555

SEQ ID NO: 267 - DNA, 39 bp, Saccharomyces cerevisiae; identical to SEQ ID NO: 194
  source 1..39: mol_type = other DNA; strain = YJM627

SEQ ID NO: 268 - DNA, 39 bp, Saccharomyces cerevisiae; identical to SEQ ID NO: 7
  source 1..39: mol_type = other DNA; strain = YJM681

SEQ ID NO: 269 - DNA, 39 bp, Saccharomyces cerevisiae; identical to SEQ ID NO: 12
  source 1..39: mol_type = other DNA; strain = YJM682

SEQ ID NO: 270 - DNA, 39 bp, Saccharomyces cerevisiae; identical to SEQ ID NO: 194
  source 1..39: mol_type = other DNA; strain = YJM683

SEQ ID NO: 271 - DNA, 39 bp, Saccharomyces cerevisiae; identical to SEQ ID NO: 7
  source 1..39: mol_type = other DNA; strain = YJM689

SEQ ID NO: 272 - DNA, 39 bp, Saccharomyces cerevisiae; identical to SEQ ID NO: 7
  source 1..39: mol_type = other DNA; strain = YJM693

SEQ ID NO: 273 - DNA, 39 bp, Saccharomyces cerevisiae; identical to SEQ ID NO: 12
  source 1..39: mol_type = other DNA; strain = YJM975

SEQ ID NO: 274 - DNA, 39 bp, Saccharomyces cerevisiae; identical to SEQ ID NO: 12
  source 1..39: mol_type = other DNA; strain = YJM984

SEQ ID NO: 275 - DNA, 39 bp, Saccharomyces cerevisiae; identical to SEQ ID NO: 7
  source 1..39: mol_type = other DNA; strain = YJM990

SEQ ID NO: 276 - DNA, 39 bp, Saccharomyces cerevisiae; identical to SEQ ID NO: 10
  source 1..39: mol_type = other DNA; strain = YJM1304

SEQ ID NO: 277 - DNA, 39 bp, Saccharomyces cerevisiae; identical to SEQ ID NO: 9
  source 1..39: mol_type = other DNA; strain = YJM1304

SEQ ID NO: 278 - DNA, 30 bp, Sclerotinia sclerotiorum
  source 1..30: mol_type = other DNA; strain = 1980 UF-70
tggtgcggaagacccggtcaaccatgcaag

SEQ ID NO: 279 - DNA, 27 bp, Sclerotinia sclerotiorum
  source 1..27: mol_type = other DNA; strain = 1980 UF-70
tggtgcggtcgtcccggtcaaccttgt

SEQ ID NO: 280 - DNA, 30 bp, Cordyceps militaris
  source 1..30: mol_type = other DNA
tggtgcacgagacccggccagccgtgctgg

SEQ ID NO: 281 - DNA, 30 bp, Cordyceps militaris
  source 1..30: mol_type = other DNA
tggtgcacgagacctggcgagccttgctgg

SEQ ID NO: 282 - DNA, 30 bp, Cordyceps militaris
  source 1..30: mol_type = other DNA
tggtgcctgagacctggccagccttgctgg

SEQ ID NO: 283 - DNA, 30 bp, Botrytis cinerea
  source 1..30: mol_type = other DNA; strain = B05.10
tggtgcggacgccccggacagccatgcaag

SEQ ID NO: 284 - DNA, 27 bp, Botrytis cinerea
  source 1..27: mol_type = other DNA; strain = B05.10
tggtgcggacgtcccggacaaccttgc

SEQ ID NO: 285 - DNA, 39 bp, Kluyveromyces marxianus
  source 1..39: mol_type = other DNA; strain = DMKU3-1042
tggaaatggctatcatttagagtagggcaaccaatttat

SEQ ID NO: 286 - DNA, 36 bp, Kluyveromyces marxianus
  source 1..36: mol_type = other DNA; strain = DMKU3-1042
tggaaatggctatcatttagagtagggcaaccaatt

SEQ ID NO: 287 - DNA, 39 bp, Kluyveromyces marxianus
  source 1..39: mol_type = other DNA; strain = DMKU3-1042
tggaagtggttatctttcagaattggacaaccaatctac

SEQ ID NO: 288 - DNA, 36 bp, Kluyveromyces marxianus
  source 1..36: mol_type = other DNA; strain = DMKU3-1042
tggaagtggttatctttcagaattggacaaccaatc

SEQ ID NO: 289 - DNA, 39 bp, Kluyveromyces marxianus
  source 1..39: mol_type = other DNA; strain = DMKU3-1042
tggaagtggttatctttgagggttgggcaaccaatttac

SEQ ID NO: 290 - DNA, 36 bp, Kluyveromyces marxianus
  source 1..36: mol_type = other DNA; strain = DMKU3-1042
tggaagtggttatctttgagggttgggcaaccaatt

SEQ ID NO: 291 - DNA, 33 bp, Kluyveromyces marxianus
  source 1..33: mol_type = other DNA; strain = DMKU3-1042
tggctatcatttagagtagggcaaccaatttat

SEQ ID NO: 292 - DNA, 39 bp, Kluyveromyces marxianus
  source 1..39: mol_type = other DNA; strain = DMKU3-1042
tgggaatggctatctttgagggtaggacaaccactttac

SEQ ID NO: 293 - DNA, 33 bp, Kluyveromyces marxianus
  source 1..33: mol_type = other DNA; strain = DMKU3-1042
tgggaatggctatctttgagggtaggacaacca

SEQ ID NO: 294 - DNA, 33 bp, Kluyveromyces marxianus
  source 1..33: mol_type = other DNA; strain = DMKU3-1042
tggttatctttcagaattggacaaccaatctac

SEQ ID NO: 295 - DNA, 33 bp, Kluyveromyces marxianus
  source 1..33: mol_type = other DNA; strain = DMKU3-1042
tggttatctttgagggttgggcaaccaatttac

SEQ ID NO: 296 - DNA, 39 bp, Kluyveromyces marxianus; identical to SEQ ID NO: 285
  source 1..39: mol_type = other DNA

SEQ ID NO: 297 - DNA, 36 bp, Kluyveromyces marxianus; identical to SEQ ID NO: 286
  source 1..36: mol_type = other DNA

SEQ ID NO: 298 - DNA, 39 bp, Kluyveromyces marxianus; identical to SEQ ID NO: 287
  source 1..39: mol_type = other DNA

SEQ ID NO: 299 - DNA, 36 bp, Kluyveromyces marxianus; identical to SEQ ID NO: 288
  source 1..36: mol_type = other DNA

SEQ ID NO: 300 - DNA, 39 bp, Kluyveromyces marxianus; identical to SEQ ID NO: 289
  source 1..39: mol_type = other DNA

SEQ ID NO: 301 - DNA, 36 bp, Kluyveromyces marxianus; identical to SEQ ID NO: 290
  source 1..36: mol_type = other DNA

SEQ ID NO: 302 - DNA, 33 bp, Kluyveromyces marxianus; identical to SEQ ID NO: 291
  source 1..33: mol_type = other DNA

SEQ ID NO: 303 - DNA, 39 bp, Kluyveromyces marxianus; identical to SEQ ID NO: 292
  source 1..39: mol_type = other DNA

SEQ ID NO: 304 - DNA, 33 bp, Kluyveromyces marxianus; identical to SEQ ID NO: 293
  source 1..33: mol_type = other DNA

SEQ ID NO: 305 - DNA, 33 bp, Kluyveromyces marxianus; identical to SEQ ID NO: 294
  source 1..33: mol_type = other DNA

SEQ ID NO: 306 - DNA, 33 bp, Kluyveromyces marxianus; identical to SEQ ID NO: 295
  source 1..33: mol_type = other DNA

SEQ ID NO: 307 - DNA, 39 bp, Saccharomyces cerevisiae
  source 1..39: mol_type = other DNA
tggcactggttaaacttgagaccaggccaaccaatgtat

SEQ ID NO: 308 - DNA, 39 bp, Saccharomyces cerevisiae; identical to SEQ ID NO: 9
  source 1..39: mol_type = other DNA

SEQ ID NO: 309 - DNA, 39 bp, Saccharomyces cerevisiae; identical to SEQ ID NO: 194
  source 1..39: mol_type = other DNA

SEQ ID NO: 310 - DNA, 39 bp, Saccharomyces cerevisiae; identical to SEQ ID NO: 101
  source 1..39: mol_type = other DNA

SEQ ID NO: 311 - DNA, 39 bp, Saccharomyces cerevisiae; identical to SEQ ID NO: 9
  source 1..39: mol_type = other DNA

SEQ ID NO: 312 - DNA, 39 bp, Saccharomyces cerevisiae; identical to SEQ ID NO: 10
  source 1..39: mol_type = other DNA

SEQ ID NO: 313 - DNA, 39 bp, Saccharomyces cerevisiae; identical to SEQ ID NO: 9
  source 1..39: mol_type = other DNA

SEQ ID NO: 314 - DNA, 39 bp, Saccharomyces cerevisiae; identical to SEQ ID NO: 10
  source 1..39: mol_type = other DNA

SEQ ID NO: 315 - DNA, 39 bp, Saccharomyces cerevisiae; identical to SEQ ID NO: 9
  source 1..39: mol_type = other DNA

SEQ ID NO: 316 - DNA, 39 bp, Saccharomyces cerevisiae; identical to SEQ ID NO: 12
  source 1..39: mol_type = other DNA

SEQ ID NO: 317 - DNA, 39 bp, Saccharomyces cerevisiae; identical to SEQ ID NO: 194
  source 1..39: mol_type = other DNA

SEQ ID NO: 318 - DNA, 39 bp, Saccharomyces cerevisiae; identical to SEQ ID NO: 7
  source 1..39: mol_type = other DNA

SEQ ID NO: 319 - DNA, 39 bp, Saccharomyces cerevisiae
  source 1..39: mol_type = other DNA
tggcactggttaaacctgagaccaggccaaccaatgtac

SEQ ID NO: 320 - DNA, 39 bp, Saccharomyces cerevisiae; identical to SEQ ID NO: 9
  source 1..39: mol_type = other DNA

SEQ ID NO: 321 - DNA, 39 bp, Saccharomyces cerevisiae; identical to SEQ ID NO: 319
  source 1..39: mol_type = other DNA

SEQ ID NO: 322 - DNA, 39 bp, Saccharomyces cerevisiae; identical to SEQ ID NO: 9
  source 1..39: mol_type = other DNA

SEQ ID NO: 323 - DNA, 39 bp, Saccharomyces cerevisiae; identical to SEQ ID NO: 319
  source 1..39: mol_type = other DNA

SEQ ID NO: 324 - DNA, 39 bp, Saccharomyces cerevisiae; identical to SEQ ID NO: 9
  source 1..39: mol_type = other DNA

SEQ ID NO: 325 - DNA, 39 bp, Saccharomyces cerevisiae; identical to SEQ ID NO: 10
  source 1..39: mol_type = other DNA

SEQ ID NO: 326 - DNA, 39 bp, Saccharomyces cerevisiae; identical to SEQ ID NO: 9
  source 1..39: mol_type = other DNA

SEQ ID NO: 327 - DNA, 39 bp, Saccharomyces cerevisiae; identical to SEQ ID NO: 7
  source 1..39: mol_type = other DNA

SEQ ID NO: 328 - DNA, 39 bp, Saccharomyces cerevisiae
  source 1..39: mol_type = other DNA
tggcattggttgcagttgaaacccggtcaaccaatgtac

SEQ ID NO: 329 - DNA, 39 bp, Saccharomyces cerevisiae; identical to SEQ ID NO: 194
  source 1..39: mol_type = other DNA

SEQ ID NO: 330 - DNA, 39 bp, Saccharomyces cerevisiae; identical to SEQ ID NO: 328
  source 1..39: mol_type = other DNA

SEQ ID NO: 331 - DNA, 36 bp, Kluyveromyces lactis
  source 1..36: mol_type = other DNA
tggagctggattactctaagacctggtcaaccgatc

SEQ ID NO: 332 - DNA, 30 bp, Zygosaccharomyces rouxii
  source 1..30: mol_type = other DNA
cactttgtggaattagaccctggtcaacca

SEQ ID NO: 333 - DNA, 30 bp, Zygosaccharomyces rouxii
  source 1..30: mol_type = other DNA
catttcattgagttagacccaggtcaaccc

SEQ ID NO: 334 - DNA, 39 bp, Lachancea thermotolerans
  source 1..39: mol_type = other DNA; strain = CBS 6340
tggcgctggctaagtctggctagaggccagccaatgtat

SEQ ID NO: 335 - DNA, 39 bp, Lachancea thermotolerans
  source 1..39: mol_type = other DNA; strain = CBS 6340
tggcgctggttgagcttgtctagagggcagccaatgtac

SEQ ID NO: 336 - DNA, 39 bp, Saccharomyces cerevisiae; identical to SEQ ID NO: 8
  source 1..39: mol_type = other DNA; strain = EC1118

SEQ ID NO: 337 - DNA, 39 bp, Saccharomyces cerevisiae; identical to SEQ ID NO: 9
  source 1..39: mol_type = other DNA; strain = EC1118

SEQ ID NO: 338 - DNA, 39 bp, Saccharomyces cerevisiae; identical to SEQ ID NO: 7
  source 1..39: mol_type = other DNA; strain = EC1118

SEQ ID NO: 339 - DNA, 39 bp, Naumovozyma castellii
  source 1..39: mol_type = other DNA; strain = CBS 4309
tggcactggttgagattggacccaggtcaaccattgtac

SEQ ID NO: 340 - DNA, 39 bp, Naumovozyma castellii
  source 1..39: mol_type = other DNA; strain = CBS 4309
tggcactggttgagattggacccaggtcaaccattatac

SEQ ID NO: 341 - DNA, 39 bp, Naumovozyma dairenensis
  source 1..39: mol_type = other DNA; strain = CBS 421
tggcattggttgagactagacccaggtcaaccattatac

SEQ ID NO: 342 - DNA, 39 bp, Naumovozyma dairenensis
  source 1..39: mol_type = other DNA; strain = CBS 421
tggcattggctaaggttagatccaggccaaccattatat

SEQ ID NO: 343 - DNA, 39 bp, Naumovozyma dairenensis
  source 1..39: mol_type = other DNA; strain = CBS 421
tggcattggttgagattggatgcaggtcaaccattatat

SEQ ID NO: 344 - DNA, 30 bp, Botrytis cinerea
  source 1..30: mol_type = other DNA; strain = T4
tggtgcggacgcccaggacaaccatgcaag

SEQ ID NO: 345 - DNA, 27 bp, Botrytis cinerea
  source 1..27: mol_type = other DNA; strain = T4
tggtgcggacgtccaggacaaccttgc

SEQ ID NO: 346 - DNA, 30 bp, Claviceps purpurea
  source 1..30: mol_type = other DNA; strain = 20.1
tggtgctggcgccctggccagggatgctgg

SEQ ID NO: 347 - DNA, 30 bp, Claviceps purpurea
  source 1..30: mol_type = other DNA; strain = 20.1
tggtgctggcgccctggtgaaggttgctgg

SEQ ID NO: 348 - DNA, 39 bp, Tetrapisispora phaffii
  source 1..39: mol_type = other DNA; strain = CBS 4417
tggcactggttaagattagaccctggtcaaccattatac

SEQ ID NO: 349 - DNA, 39 bp, Kazachstania africana
  source 1..39: mol_type = other DNA; strain = CBS 2517
tggcactggttaagcattgcaccaggccaaccaatgtac

SEQ ID NO: 350 - DNA, 39 bp, Kazachstania africana
  source 1..39: mol_type = other DNA; strain = CBS 2517
tggcactggttgagcatctctcctggtcaacctatgtac

SEQ ID NO: 351 - DNA, 39 bp, Kazachstania africana
  source 1..39: mol_type = other DNA; strain = CBS 2517
tggcactggttaagcatttctccaggtcaaccaatgtac

SEQ ID NO: 352 - DNA, 30 bp, Tetrapisispora blattae
  source 1..30: mol_type = other DNA; strain = CBS 6284
cactggttgagattgggtcgtggtgagcca

SEQ ID NO: 353 - DNA, 36 bp, Tetrapisispora blattae
  source 1..36: mol_type = other DNA; strain = CBS 6284
cattggttaagattaggtcgtggtgaaccattatac

SEQ ID NO: 354 - DNA, 39 bp, Kazachstania naganishii
  source 1..39: mol_type = other DNA; strain = CBS 8797
tggcactggttgaggttgtcctacggtcagcctatctac

SEQ ID NO: 355 - DNA, 36 bp, Kazachstania naganishii
  source 1..36: mol_type = other DNA; strain = CBS 8797
tggcattggttgagattgtcctacggccaacctatc

SEQ ID NO: 356 - DNA, 33 bp, Kazachstania naganishii
  source 1..33: mol_type = other DNA; strain = CBS 8797
tggcattggttgagattgtcctacggccaacct

SEQ ID NO: 357 - DNA, 30 bp, Fusarium fujikuroi
  source 1..30: mol_type = other DNA; strain = IMI 58289
tggtgcacttggcgaggccagccatgctgg

SEQ ID NO: 358 - DNA, 30 bp, Fusarium fujikuroi
  source 1..30: mol_type = other DNA; strain = IMI 58289
tggtgcatgtggcgtggacaaccttgttgg

SEQ ID NO: 359 - DNA, 36 bp, Kluyveromyces dobzhanskii
  source 1..36: mol_type = other DNA; strain = CBS 2104
tggagctggatctcccttagacctggtcaacctatt

SEQ ID NO: 360 - DNA, 36 bp, Kluyveromyces dobzhanskii
  source 1..36: mol_type = other DNA; strain = CBS 2104
tggagttggatctctttgagacgtggtcagccaatt

SEQ ID NO: 361 - DNA, 30 bp, Fusarium graminearum
  source 1..30: mol_type = other DNA
tggtgcacctggaaaggccagccttgctgg

SEQ ID NO: 362 - DNA, 30 bp, Fusarium graminearum
  source 1..30: mol_type = other DNA
tggtgctggtggaagggccaaccttgctgg

SEQ ID NO: 363 - DNA, 30 bp, Fusarium venenatum
  source 1..30: mol_type = other DNA
tggtgcacctggaagggacagccttgctgg

SEQ ID NO: 364 - DNA, 30 bp, Fusarium venenatum
  source 1..30: mol_type = other DNA
tggtgctggtggaagggacaaccttgctgg

SEQ ID NO: 365 - DNA, 39 bp, Lachancea lanzarotensis
  source 1..39: mol_type = other DNA
tggaggtggttgagtctggccagaggtcaaccaatgtac

SEQ ID NO: 366 - DNA, 30 bp, Verticillium longisporum
  source 1..30: mol_type = other DNA
ccctgcccccgacctggacagggctgctgg

SEQ ID NO: 367 - DNA, 30 bp, Verticillium longisporum; identical to SEQ ID NO: 366
  source 1..30: mol_type = other DNA

SEQ ID NO: 368 - DNA, 30 bp, Verticillium longisporum; identical to SEQ ID NO: 366
  source 1..30: mol_type = other DNA

SEQ ID NO: 369 - DNA, 39 bp, Lachancea quebecensis
  source 1..39: mol_type = other DNA
tggcgctggttgagcttgtctagaggacagccaatgtac

SEQ ID NO: 370 - DNA, 39 bp, Lachancea quebecensis
  source 1..39: mol_type = other DNA
tggcgctggttgaggttgtctagaggacagccaatgtac

SEQ ID NO: 371 - DNA, 33 bp, Lachancea quebecensis
  source 1..33: mol_type = other DNA
tggttgagcttgtctagaggacagccaatgtac

SEQ ID NO: 372 - DNA, 33 bp, Lachancea quebecensis
  source 1..33: mol_type = other DNA
tggttgaggttgtctagaggacagccaatgtac

SEQ ID NO: 373 - DNA, 30 bp, Fusarium proliferatum
  source 1..30: mol_type = other DNA
tggtgcatgtggcgtggacaaccttgctgg

SEQ ID NO: 374 - DNA, 30 bp, Fusarium proliferatum
  source 1..30: mol_type = other DNA
tggtgtacctggaggggccaaccctgctgg

SEQ ID NO: 375 - DNA, 30 bp, Fusarium mangiferae
  source 1..30: mol_type = other DNA
tggtgcacttggcgaggccaaccatgctgg

SEQ ID NO: 376 - DNA, 30 bp, Fusarium mangiferae
  source 1..30: mol_type = other DNA
tggtgcatgtggcgaggccagccttgctgg

SEQ ID NO: 377 - DNA, 30 bp, Fusarium proliferatum
  source 1..30: mol_type = other DNA; strain = ET1
tggtgcacctggcgcggacaaccttgctgg

SEQ ID NO: 378 - DNA, 30 bp, Fusarium proliferatum
  source 1..30: mol_type = other DNA; strain = ET1
tggtgtatgtggcgaggtcagccatgctgg

SEQ ID NO: 379 - DNA, 39 bp, Saccharomyces cerevisiae; identical to SEQ ID NO: 8
  source 1..39: mol_type = other DNA; strain = S288C

SEQ ID NO: 380 - DNA, 39 bp, Saccharomyces cerevisiae; identical to SEQ ID NO: 9
  source 1..39: mol_type = other DNA; strain = S288C

SEQ ID NO: 381 - DNA, 39 bp, Saccharomyces cerevisiae; identical to SEQ ID NO: 7
  source 1..39: mol_type = other DNA; strain = S288C

SEQ ID NO: 382 - DNA, 39 bp, Saccharomyces cerevisiae; identical to SEQ ID NO: 12
  source 1..39: mol_type = other DNA; strain = YJM789

SEQ ID NO: 383 - DNA, 39 bp, Saccharomyces cerevisiae; identical to SEQ ID NO: 8
  source 1..39: mol_type = other DNA; strain = YJM789

SEQ ID NO: 384 - DNA, 39 bp, Saccharomyces cerevisiae; identical to SEQ ID NO: 9
  source 1..39: mol_type = other DNA; strain = YJM789

SEQ ID NO: 385 - DNA, 30 bp, Sclerotinia sclerotiorum
  source 1..30: mol_type = other DNA; strain = 1980 UF-70
tggtgcggacgccccggacaaccctgcaaa

SEQ ID NO: 386 - DNA, 27 bp, Sclerotinia sclerotiorum
  source 1..27: mol_type = other DNA; strain = 1980 UF-70
tggtgcggccgtcccggtcaaccttgc

SEQ ID NO: 387 - DNA, 39 bp, Vanderwaltozyma polyspora
  source 1..39: mol_type = other DNA; strain = DSM 70294
tggcactggttgagactaagatatggtgaaccaatctac

SEQ ID NO: 388 - DNA, 36 bp, Vanderwaltozyma polyspora
  source 1..36: mol_type = other DNA; strain = DSM 70294
tggcactggttggaattggacaacggtcaaccaatc

SEQ ID NO: 389 - DNA, 39 bp, Vanderwaltozyma polyspora
  source 1..39: mol_type = other DNA; strain = DSM 70294
tggcactggttggaattggacaatggtcaaccaatctac

SEQ ID NO: 390 - DNA, 39 bp, Saccharomyces cerevisiae; identical to SEQ ID NO: 8
  source 1..39: mol_type = other DNA; strain = RM11-1a

SEQ ID NO: 391 - DNA, 39 bp, Saccharomyces cerevisiae; identical to SEQ ID NO: 9
  source 1..39: mol_type = other DNA; strain = RM11-1a

SEQ ID NO: 392 - DNA, 39 bp, Saccharomyces cerevisiae; identical to SEQ ID NO: 185
  source 1..39: mol_type = other DNA; strain = RM11-1a

SEQ ID NO: 393 - DNA, 39 bp, Saccharomyces cerevisiae; identical to SEQ ID NO: 8
  source 1..39: mol_type = other DNA; strain = JAY291

SEQ ID NO: 394 - DNA, 39 bp, Saccharomyces cerevisiae; identical to SEQ ID NO: 9
  source 1..39: mol_type = other DNA; strain = JAY291

SEQ ID NO: 395 - DNA, 39 bp, Saccharomyces cerevisiae; identical to SEQ ID NO: 185
  source 1..39: mol_type = other DNA; strain = JAY291

SEQ ID NO: 396 - DNA, 30 bp, Verticillium alfalfae; identical to SEQ ID NO: 366
  source 1..30: mol_type = other DNA; strain = VaMs.102

SEQ ID NO: 397 - DNA, 30 bp, Metarhizium acridum
  source 1..30: mol_type = other DNA; strain = CQMa 102
tggtgctaccggcctgggcaaccctgctgg

SEQ ID NO: 398 - DNA, 30 bp, Metarhizium acridum
  source 1..30: mol_type = other DNA; strain = CQMa 102
tggtgctggaggccaggtcagccatgctgg

SEQ ID NO: 399 - DNA, 30 bp, Metarhizium acridum
  source 1..30: mol_type = other DNA; strain = CQMa 102
tggtgctggcagcctggccaaccttgctgg

SEQ ID NO: 400 - DNA, 30 bp, Metarhizium robertsii
  source 1..30: mol_type = other DNA; strain = ARSEF 23
tggtgctggcagcctggccagccttgctgg

SEQ ID NO: 401 - DNA, 30 bp, Metarhizium robertsii
  source 1..30: mol_type = other DNA; strain = ARSEF 23
tggtgctggcgacctggccaaccttgctgg

SEQ ID NO: 402 - DNA, 39 bp, Saccharomyces cerevisiae; identical to SEQ ID NO: 12
  source 1..39: mol_type = other DNA; strain = FostersB

SEQ ID NO: 403 - DNA, 39 bp, Saccharomyces cerevisiae; identical to SEQ ID NO: 8
  source 1..39: mol_type = other DNA; strain = FostersB

SEQ ID NO: 404 - DNA, 39 bp, Saccharomyces cerevisiae; identical to SEQ ID NO: 9
  source 1..39: mol_type = other DNA; strain = FostersB

SEQ ID NO: 405 - DNA, 39 bp, Saccharomyces cerevisiae; identical to SEQ ID NO: 8
  source 1..39: mol_type = other DNA; strain = FostersO

SEQ ID NO: 406 - DNA, 39 bp, Saccharomyces cerevisiae; identical to SEQ ID NO: 9
  source 1..39: mol_type = other DNA; strain = FostersO

SEQ ID NO: 407 - DNA, 39 bp, Saccharomyces cerevisiae; identical to SEQ ID NO: 185
  source 1..39: mol_type = other DNA; strain = AWRI796

SEQ ID NO: 408 - DNA, 39 bp, Saccharomyces cerevisiae; identical to SEQ ID NO: 8
  source 1..39: mol_type = other DNA; strain = AWRI796

SEQ ID NO: 409 - DNA, 39 bp, Saccharomyces cerevisiae; identical to SEQ ID NO: 9
  source 1..39: mol_type = other DNA; strain = AWRI796

SEQ ID NO: 410 - DNA, 39 bp, Saccharomyces cerevisiae; identical to SEQ ID NO: 185
  source 1..39: mol_type = other DNA; strain = Vin13

SEQ ID NO: 411 - DNA, 39 bp, Saccharomyces cerevisiae; identical to SEQ ID NO: 8
  source 1..39: mol_type = other DNA; strain = Vin13

SEQ ID NO: 412 - DNA, 39 bp, Saccharomyces cerevisiae; identical to SEQ ID NO: 9
  source 1..39: mol_type = other DNA; strain = Vin13

SEQ ID NO: 413 - DNA, 39 bp, Saccharomyces cerevisiae; identical to SEQ ID NO: 12
  source 1..39: mol_type = other DNA; strain = Lalvin QA23

SEQ ID NO: 414 - DNA, 39 bp, Saccharomyces cerevisiae; identical to SEQ ID NO: 8
  source 1..39: mol_type = other DNA; strain = Lalvin QA23

SEQ ID NO: 415 - DNA, 39 bp, Saccharomyces cerevisiae; identical to SEQ ID NO: 9
  source 1..39: mol_type = other DNA; strain = Lalvin QA23

SEQ ID NO: 416 - DNA, 39 bp, Saccharomyces cerevisiae; identical to SEQ ID NO: 12
  source 1..39: mol_type = other DNA; strain = VL3

SEQ ID NO: 417 - DNA, 39 bp, Saccharomyces cerevisiae; identical to SEQ ID NO: 10
  source 1..39: mol_type = other DNA; strain = VL3

SEQ ID NO: 418 - DNA, 39 bp, Saccharomyces cerevisiae; identical to SEQ ID NO: 9
  source 1..39: mol_type = other DNA; strain = VL3

SEQ ID NO: 419 - DNA, 30 bp, Fusarium oxysporum
  source 1..30: mol_type = other DNA; strain = Fo5176
tggtgcacatggcgcggacaaccctgctgg

SEQ ID NO: 420 - DNA, 30 bp, Fusarium oxysporum
  source 1..30: mol_type = other DNA; strain = Fo5176
tggtgcatgtggcgaggacaaccttgctgg

SEQ ID NO: 421 - DNA, 30 bp, Fusarium oxysporum
  source 1..30: mol_type = other DNA; strain = Fo5176
tggtgcttgtggcgaggtcagccgtgctgg

SEQ ID NO: 422 - DNA, 30 bp, Fusarium oxysporum
  source 1..30: mol_type = other DNA; strain = Fo5176
tggtgtacttggcgcggacagccctgttgg

SEQ ID NO: 423 - DNA, 30 bp, Verticillium dahliae
  source 1..30: mol_type = other DNA; strain = VdLs.17
ccatgcccccgacctggccagggctgctgg

SEQ ID NO: 424 - DNA, 30 bp, Pyricularia oryzae
  source 1..30: mol_type = other DNA; strain = 70-15
tggtgcccgcgtcgcggccagccctgctgg

SEQ ID NO: 425 - DNA, 39 bp, Saccharomyces sp.
  source 1..39: mol_type = other DNA; note = Saccharomyces cerevisiae x Saccharomyces kudriavzevii VIN7
tggcactggttgcaattgaaacccggtcaaccaatgtac

SEQ ID NO: 426 - DNA, 39 bp, Saccharomyces sp.; identical to SEQ ID NO: 8
  source 1..39: mol_type = other DNA; note = Saccharomyces cerevisiae x Saccharomyces kudriavzevii VIN7

SEQ ID NO: 427 - DNA, 39 bp, Saccharomyces sp.; identical to SEQ ID NO: 9
  source 1..39: mol_type = other DNA; note = Saccharomyces cerevisiae x Saccharomyces kudriavzevii VIN7

SEQ ID NO: 428 - DNA, 39 bp, Saccharomyces cerevisiae; identical to SEQ ID NO: 7
  source 1..39: mol_type = other DNA; strain = CEN.PK113-7D

SEQ ID NO: 429 - DNA, 39 bp, Saccharomyces cerevisiae; identical to SEQ ID NO: 8
  source 1..39: mol_type = other DNA; strain = CEN.PK113-7D

SEQ ID NO: 430 - DNA, 39 bp, Saccharomyces cerevisiae; identical to SEQ ID NO: 9
  source 1..39: mol_type = other DNA; strain = CEN.PK113-7D

SEQ ID NO: 431 - DNA, 30 bp, Beauveria bassiana
  source 1..30: mol_type = other DNA; strain = ARSEF 2860
tggtgcatgagacccggtcagccatgctgg

SEQ ID NO: 432 - DNA, 39 bp, Saccharomyces kudriavzevii
  source 1..39: mol_type = other DNA; strain = IFO 1802
tggcactggttgcaattgaaacccggtcaaccaatgtat

SEQ ID NO: 433 - DNA, 39 bp, Saccharomyces kudriavzevii
  source 1..39: mol_type = other DNA; strain = IFO 1802
tggcactggttgcaactaaagccaggtcaaccaatgtac

SEQ ID NO: 434 - DNA, 39 bp, Saccharomyces kudriavzevii
  source 1..39: mol_type = other DNA; strain = IFO 1802
tggcactggttgcaattgagacctggtcagccaatgtac

SEQ ID NO: 435 - DNA, 30 bp, Fusarium pseudograminearum; identical to SEQ ID NO: 363
  source 1..30: mol_type = other DNA; strain = CS3096

SEQ ID NO: 436 - DNA, 30 bp, Fusarium pseudograminearum; identical to SEQ ID NO: 364
  source 1..30: mol_type = other DNA; strain = CS3096

SEQ ID NO: 437 - DNA, 30 bp, Pyricularia oryzae
  source 1..30: mol_type = other DNA; strain = Y34
tggtgcccccgccgcggccagccctgctgg

SEQ ID NO: 438 - DNA, 30 bp, Pyricularia oryzae
  source 1..30: mol_type = other DNA; strain = P131
tggtgcccgcgccgaggccagccttgctgg

SEQ ID NO: 439 - DNA, 27 bp, Pseudogymnoascus destructans
  source 1..27: mol_type = other DNA; strain = 20631-21
tgctggcgtccagggcagccatgtggc

SEQ ID NO: 440 - DNA, 27 bp, Botrytis cinerea
  source 1..27: mol_type = other DNA; strain = BcDW1
tggtgcggacgtcccggacaaccttgc

SEQ ID NO: 441 - DNA, 30 bp, Botrytis cinerea
  source 1..30: mol_type = other DNA; strain = BcDW1
tggtgtggacgtcccggacaaccatgcaag

SEQ ID NO: 442 - DNA, 30 bp, Fusarium odoratissimum; identical to SEQ ID NO: 420
  source 1..30: mol_type = other DNA

SEQ ID NO: 443 - DNA, 30 bp, Fusarium odoratissimum
  source 1..30: mol_type = other DNA
tggtgcttgtggcgtggccagccctgctgg

SEQ ID NO: 444 - DNA, 30 bp, Fusarium odoratissimum; identical to SEQ ID NO: 422
  source 1..30: mol_type = other DNA

SEQ ID NO: 445 - DNA, 30 bp, Fusarium oxysporum; identical to SEQ ID NO: 420
  source 1..30: mol_type = other DNA; note = f. sp. cubense race 1

SEQ ID NO: 446 - DNA, 30 bp, Fusarium oxysporum; identical to SEQ ID NO: 443
  source 1..30: mol_type = other DNA; note = f. sp. cubense race 1

SEQ ID NO: 447 - DNA, 30 bp, Fusarium oxysporum; identical to SEQ ID NO: 422
  source 1..30: mol_type = other DNA; note = f. sp. cubense race 1

SEQ ID NO: 448 - DNA, 30 bp, Fusarium graminearum; identical to SEQ ID NO: 361
  source 1..30: mol_type = other DNA; strain = PH-1

SEQ ID NO: 449 - DNA, 30 bp, Fusarium graminearum
  source 1..30: mol_type = other DNA; strain = PH-1
tggtgctggtggaagggacagccatgctgg

SEQ ID NO: 450 - DNA, 27 bp, Sclerotinia borealis
  source 1..27: mol_type = other DNA; strain = F-4128
tggtgcggacgcccaggtcaaccttgc

SEQ ID NO: 451 - DNA, 30 bp, Sclerotinia borealis
  source 1..30: mol_type = other DNA; strain = F-4128
tggtgtggacgccctggacaaccttgcaag

SEQ ID NO: 452 - DNA, 30 bp, Fusarium verticillioides; identical to SEQ ID NO: 374
  source 1..30: mol_type = other DNA; strain = 7600

SEQ ID NO: 453 - DNA, 30 bp, Fusarium verticillioides
  source 1..30: mol_type = other DNA; strain = 7600
tggtgtatgtggcgaggacagccatgctgg

SEQ ID NO: 454 - DNA, 39 bp, Saccharomyces cerevisiae; identical to SEQ ID NO: 185
  source 1..39: mol_type = other DNA; strain = P301

SEQ ID NO: 455 - DNA, 39 bp, Saccharomyces cerevisiae; identical to SEQ ID NO: 8
  source 1..39: mol_type = other DNA; strain = P301

SEQ ID NO: 456 - DNA, 39 bp, Saccharomyces cerevisiae; identical to SEQ ID NO: 9
  source 1..39: mol_type = other DNA; strain = P301

SEQ ID NO: 457 - DNA, 39 bp, Saccharomyces cerevisiae; identical to SEQ ID NO: 185
  source 1..39: mol_type = other DNA; strain = R103

SEQ ID NO: 458 - DNA, 39 bp, Saccharomyces cerevisiae; identical to SEQ ID NO: 10
  source 1..39: mol_type = other DNA; strain = R103

SEQ ID NO: 459 - DNA, 39 bp, Saccharomyces cerevisiae; identical to SEQ ID NO: 9
  source 1..39: mol_type = other DNA; strain = R103

SEQ ID NO: 460 - DNA, 30 bp, Fusarium oxysporum; identical to SEQ ID NO: 421
  source 1..30: mol_type = other DNA; strain = NRRL 32931

SEQ ID NO: 461 - DNA, 30 bp, Fusarium oxysporum
  source 1..30: mol_type = other DNA; strain = NRRL 32931
tggtgtacctggcgtggtcagccatgctgg

SEQ ID NO: 462 - DNA, 30 bp, Fusarium oxysporum; identical to SEQ ID NO: 453
  source 1..30: mol_type = other DNA; strain = NRRL 32931

SEQ ID NO: 463 - DNA, 30 bp, Fusarium oxysporum; identical to SEQ ID NO: 443
  source 1..30: mol_type = other DNA; strain = Fo47

SEQ ID NO: 464 - DNA, 30 bp, Fusarium oxysporum
  source 1..30: mol_type = other DNA; strain = Fo47
tggtgtacttggcgcggccagccctgttgg

SEQ ID NO: 465 - DNA, 30 bp, Fusarium oxysporum; identical to SEQ ID NO: 453
  source 1..30: mol_type = other DNA; strain = Fo47

SEQ ID NO: 466 - DNA, 30 bp, Fusarium oxysporum; identical to SEQ ID NO: 420
  source 1..30: mol_type = other DNA; strain = f. sp. lycopersici MN25

SEQ ID NO: 467 - DNA, 30 bp, Fusarium oxysporum; identical to SEQ ID NO: 443
  source 1..30: mol_type = other DNA; note = f. sp. lycopersici MN25

SEQ ID NO: 468 - DNA, 30 bp, Fusarium oxysporum
  source 1..30: mol_type = other DNA; note = f. sp. lycopersici MN25
tggtgtacttggcgaggtcagccttgctgg

SEQ ID NO: 469 - DNA, 30 bp, Fusarium oxysporum; identical to SEQ ID NO: 420
  source 1..30: mol_type = other DNA; note = f. sp. pisi HDV247

SEQ ID NO: 470 - DNA, 30 bp, Fusarium oxysporum; identical to SEQ ID NO: 421
  source 1..30: mol_type = other DNA; note = f. sp. pisi HDV247

SEQ ID NO: 471 - DNA, 30 bp, Fusarium oxysporum; identical to SEQ ID NO: 422
  source 1..30: mol_type = other DNA; note = f. sp. pisi HDV247

SEQ ID NO: 472 - DNA, 30 bp, Fusarium oxysporum
  source 1..30: mol_type = other DNA; note = f. sp. melonis 26406
tggtgcacctggagaggtcagccttgctgg

SEQ ID NO: 473 - DNA, 30 bp, Fusarium oxysporum; identical to SEQ ID NO: 420
  source 1..30: mol_type = other DNA; note = f. sp. melonis 26406

SEQ ID NO: 474 - DNA, 30 bp, Fusarium oxysporum; identical to SEQ ID NO: 443
  source 1..30: mol_type = other DNA; note = f. sp. melonis 26406

SEQ ID NO: 475 - DNA, 30 bp, Fusarium oxysporum; identical to SEQ ID NO: 420
  source 1..30: mol_type = other DNA; note = f. sp. raphani 54005

SEQ ID NO: 476 - DNA, 30 bp, Fusarium oxysporum; identical to SEQ ID NO: 421
  source 1..30: mol_type = other DNA; note = f. sp. raphani 54005

SEQ ID NO: 477 - DNA, 30 bp, Fusarium oxysporum; identical to SEQ ID NO: 422
  source 1..30: mol_type = other DNA; note = f. sp. raphani 54005

SEQ ID NO: 478 - DNA, 30 bp, Fusarium oxysporum; identical to SEQ ID NO: 420
  source 1..30: mol_type = other DNA; note = f. sp. radicis-lycopersici 26381

SEQ ID NO: 479 - DNA, 30 bp, Fusarium oxysporum; identical to SEQ ID NO: 421
  source 1..30: mol_type = other DNA; note = f. sp. radicis-lycopersici 26381

SEQ ID NO: 480 - DNA, 30 bp, Fusarium oxysporum; identical to SEQ ID NO: 464
  source 1..30: mol_type = other DNA; note = f. sp. radicis-lycopersici 26381

SEQ ID NO: 481 - DNA, 30 bp, Fusarium oxysporum; identical to SEQ ID NO: 421
  source 1..30: mol_type = other DNA; note = f. sp. conglutinans race 2 54008

SEQ ID NO: 482 - DNA, 30 bp, Fusarium oxysporum; identical to SEQ ID NO: 422
  source 1..30: mol_type = other DNA; note = f. sp. conglutinans race 2 54008

SEQ ID NO: 483 - DNA, 30 bp, Fusarium oxysporum; identical to SEQ ID NO: 453
  source 1..30: mol_type = other DNA; note = f. sp. conglutinans race 2 54008

SEQ ID NO: 484 - DNA, 30 bp, Fusarium odoratissimum; identical to SEQ ID NO: 419
  source 1..30: mol_type = other DNA; strain = NRRL 54006

SEQ ID NO: 485 - DNA, 30 bp, Fusarium odoratissimum; identical to SEQ ID NO: 443
  source 1..30: mol_type = other DNA; strain = NRRL 54006

SEQ ID NO: 486 - DNA, 30 bp, Fusarium odoratissimum; identical to SEQ ID NO: 453
  source 1..30: mol_type = other DNA; strain = NRRL 54006

SEQ ID NO: 487 - DNA, 30 bp, Fusarium oxysporum; identical to SEQ ID NO: 419
  source 1..30: mol_type = other DNA; note = f. sp. vasinfectum 25433

SEQ ID NO: 488 - DNA, 30 bp, Fusarium oxysporum; identical to SEQ ID NO: 421
  source 1..30: mol_type = other DNA; note = f. sp. vasinfectum 25433

SEQ ID NO: 489 - DNA, 30 bp, Fusarium oxysporum; identical to SEQ ID NO: 453
  source 1..30: mol_type = other DNA; note = f. sp. vasinfectum 25433

SEQ ID NO: 490 - DNA, 30 bp, Metarhizium robertsii
  source 1..30: mol_type = other DNA
tggtgctggaggccgggtcaaccatgttgg

SEQ ID NO: 491 - DNA, 30 bp, Metarhizium robertsii; identical to SEQ ID NO: 400
  source 1..30: mol_type = other DNA

SEQ ID NO: 492 - DNA, 30 bp, Fusarium graminearum; identical to SEQ ID NO: 361
  source 1..30: mol_type = other DNA

SEQ ID NO: 493 - DNA, 30 bp, Fusarium graminearum; identical to SEQ ID NO: 362
  source 1..30: mol_type = other DNA

SEQ ID NO: 494 - DNA, 39 bp, Saccharomyces cerevisiae; identical to SEQ ID NO: 10
  source 1..39: mol_type = other DNA; strain = Kyokai no. 7

SEQ ID NO: 495 - DNA, 39 bp, Saccharomyces cerevisiae; identical to SEQ ID NO: 9
  source 1..39: mol_type = other DNA; strain = Kyokai no. 7

SEQ ID NO: 496 - DNA, 39 bp, Saccharomyces cerevisiae; identical to SEQ ID NO: 7
  source 1..39: mol_type = other DNA; strain = Kyokai no. 7

SEQ ID NO: 497 - DNA, 30 bp, Ustilaginoidea virens
  source 1..30: mol_type = other DNA
tggtgcgatcgtcccgggcaaccatgctgg

SEQ ID NO: 498 - DNA, 30 bp, Ustilaginoidea virens
  source 1..30: mol_type = other DNA
tggtgctggcgacccggtgaaccctgctgg

SEQ ID NO: 499 - DNA, 30 bp, Ustilaginoidea virens
  source 1..30: mol_type = other DNA
tggtgctggcgtccgggtcagccgtgctgg

SEQ ID NO: 500 - DNA, 30 bp, Zygosaccharomyces rouxii; identical to SEQ ID NO: 332
  source 1..30: mol_type = other DNA

SEQ ID NO: 501 - DNA, 30 bp, Zygosaccharomyces rouxii
  source 1..30: mol_type = other DNA
cattttatcgaattggacccaggccaacca

SEQ ID NO: 502 - DNA, 30 bp, Zygosaccharomyces rouxii
  source 1..30: mol_type = other DNA
cactttgtagaattggacccaggtcaacca

SEQ ID NO: 503 - DNA, 39 bp, Saccharomyces cerevisiae; identical to SEQ ID NO: 10
  source 1..39: mol_type = other DNA

SEQ ID NO: 504 - DNA, 39 bp, Saccharomyces cerevisiae; identical to SEQ ID NO: 9
  source 1..39: mol_type = other DNA

SEQ ID NO: 505 - DNA, 39 bp, Saccharomyces cerevisiae; identical to SEQ ID NO: 185
  source 1..39: mol_type = other DNA

SEQ ID NO: 506 - DNA, 33 bp, unidentified
  misc_feature 1..33: note = Candida
  source 1..33: mol_type = other DNA
tggggatggttgagattctatccaggtgagcca

SEQ ID NO: 507 - DNA, 33 bp, unidentified
  misc_feature 1..33: note = Candida
  source 1..33: mol_type = other DNA
tggggttggttgagatttttcccaggtgagccc

SEQ ID NO: 508 - DNA, 30 bp, Zygosaccharomyces mellis
  source 1..30: mol_type = other DNA
cacttcattgagttagatgccggtcagcca

SEQ ID NO: 509 - DNA, 30 bp, Zygosaccharomyces mellis
  source 1..30: mol_type = other DNA
catttcgtagaattggatcctggccaaccc

SEQ ID NO: 510 - DNA, 36 bp, Metschnikowia sp.
  source 1..36: mol_type = other DNA; note = JCM 33374
tggcactgggtcgctttgggcttgggccaaccaatg

SEQ ID NO: 511 - DNA, 33 bp, Metschnikowia sp.
  source 1..33: mol_type = other DNA; note = JCM 33374
tggcactgggtcgctttgggcttgggccaacca

SEQ ID NO: 512 - DNA, 36 bp, Metschnikowia sp.
  source 1..36: mol_type = other DNA; note = JCM 33374
tggcactgggtctccttgggattgggccagccaatg

SEQ ID NO: 513 - DNA, 33 bp, Metschnikowia sp.
  source 1..33: mol_type = other DNA; note = JCM 33374
tggcactgggtctccttgggcttgggccagcca

SEQ ID NO: 514 - DNA, 36 bp, Metschnikowia sp.
  source 1..36: mol_type = other DNA; note = JCM 33374
tggcactgggtcgccttgggcttgggccaaccaatg

SEQ ID NO: 515 - DNA, 33 bp, Metschnikowia sp.
  source 1..33: mol_type = other DNA; note = JCM 33374
tggcactgggtcgccttgggcttgggccaacca

SEQ ID NO: 516 - DNA, 36 bp, Metschnikowia sp.
  source 1..36: mol_type = other DNA; note = JCM 33374
tggcattgggtctccttgggcttgggccaaccaatg

SEQ ID NO: 517 - DNA, 33 bp, Metschnikowia sp.
  source 1..33: mol_type = other DNA; note = JCM 33374
tggcattgggtctctttgggcttgggccaacca

SEQ ID NO: 518 - DNA, 39 bp, Saccharomyces cerevisiae; identical to SEQ ID NO: 8
  source 1..39: mol_type = other DNA

SEQ ID NO: 519 - DNA, 39 bp, Saccharomyces cerevisiae; identical to SEQ ID NO: 9
  source 1..39: mol_type = other DNA

SEQ ID NO: 520 - DNA, 39 bp, Saccharomyces cerevisiae; identical to SEQ ID NO: 10
  source 1..39: mol_type = other DNA

SEQ ID NO: 521 - DNA, 39 bp, Saccharomyces cerevisiae; identical to SEQ ID NO: 9
  source 1..39: mol_type = other DNA

SEQ ID NO: 522 - DNA, 39 bp, Saccharomyces cerevisiae; identical to SEQ ID NO: 10
  source 1..39: mol_type = other DNA

SEQ ID NO: 523 - DNA, 39 bp, Saccharomyces cerevisiae; identical to SEQ ID NO: 9
  source 1..39: mol_type = other DNA

SEQ ID NO: 524 - DNA, 27 bp, Monilinia fructicola
  source 1..27: mol_type = other DNA
tggtgcggacgccccggacaaggatgc

SEQ ID NO: 525 - DNA, 30 bp, Monilinia fructicola
  source 1..30: mol_type = other DNA
tggtgcggacgccctggtcaaggatgcaag

SEQ ID NO: 526 - DNA, 30 bp, Monilinia laxa
  source 1..30: mol_type = other DNA
tggtgcggacgccccggacaaggatgcaag

SEQ ID NO: 527 - DNA, 27 bp, Monilinia laxa
  source 1..27: mol_type = other DNA
tggtgcggacgccctggacaaggttgc

SEQ ID NO: 528 - DNA, 30 bp, Colletotrichum fructicola
  source 1..30: mol_type = other DNA
tggtgcacgaagcccggccagccttgctgg

SEQ ID NO: 529 - DNA, 30 bp, Colletotrichum asianum
  source 1..30: mol_type = other DNA
tggtgcaccgaacccggccagccctgctgg

SEQ ID NO: 530 - DNA, 30 bp, Colletotrichum asianum
  source 1..30: mol_type = other DNA
tggtgcacgaagcctgggcagccgtgctgg

SEQ ID NO: 531 - DNA, 30 bp, Colletotrichum asianum
  source 1..30: mol_type = other DNA
tggtgcactcagcccgggcagccatgctgg

SEQ ID NO: 532 - DNA, 30 bp, Fusarium pseudograminearum; identical to SEQ ID NO: 362
  source 1..30: mol_type = other DNA

SEQ ID NO: 533 - DNA, 30 bp, Fusarium pseudograminearum
  source 1..30: mol_type = other DNA
tggtgtacctggaagggacagccctgctgg

SEQ ID NO: 534 - DNA, 30 bp, Beauveria bassiana; identical to SEQ ID NO: 431
  source 1..30: mol_type = other DNA

SEQ ID NO: 535 - DNA, 39 bp, Saccharomyces cerevisiae; identical to SEQ ID NO: 7
  source 1..39: mol_type = other DNA

SEQ ID NO: 536 - DNA, 39 bp, Saccharomyces cerevisiae; identical to SEQ ID NO: 8
  source 1..39: mol_type = other DNA

SEQ ID NO: 537 - DNA, 39 bp, Saccharomyces cerevisiae; identical to SEQ ID NO: 9
  source 1..39: mol_type = other DNA

SEQ ID NO: 538 - DNA, 39 bp, Saccharomyces cerevisiae; identical to SEQ ID NO: 8
  source 1..39: mol_type = other DNA

SEQ ID NO: 539 - DNA, 39 bp, Saccharomyces cerevisiae; identical to SEQ ID NO: 9
  source 1..39: mol_type = other DNA

SEQ ID NO: 540 - DNA, 39 bp, Saccharomyces cerevisiae; identical to SEQ ID NO: 7
  source 1..39: mol_type = other DNA

SEQ ID NO: 541 - DNA, 30 bp, Verticillium dahliae; identical to SEQ ID NO: 423
  source 1..30: mol_type = other DNA; strain = VDG2

SEQ ID NO: 542 - DNA, 30 bp, Verticillium dahliae
  source 1..30: mol_type = other DNA; strain = VDG1
ccatgcccccgtcctggacagggctgctgg

SEQ ID NO: 543 - DNA, 30 bp, Colletotrichum gloeosporioides; identical to SEQ ID NO: 530
  source 1..30: mol_type = other DNA

SEQ ID NO: 544 - DNA, 33 bp, unidentified
  misc_feature 1..33: note = Candida
  source 1..33: mol_type = other DNA
tggggctggttaagatttatgccaggcgagcca

SEQ ID NO: 545 - DNA, 33 bp, unidentified; identical to SEQ ID NO: 544
  misc_feature 1..33: note = Candida
  source 1..33: mol_type = other DNA

SEQ ID NO: 546 - DNA, 39 bp, Saccharomyces cerevisiae; identical to SEQ ID NO: 12
  source 1..39: mol_type = other DNA

SEQ ID NO: 547 - DNA, 39 bp, Saccharomyces cerevisiae; identical to SEQ ID NO: 8
  source 1..39: mol_type = other DNA

SEQ ID NO: 548 - DNA, 39 bp, Saccharomyces cerevisiae; identical to SEQ ID NO: 9
  source 1..39: mol_type = other DNA

SEQ ID NO: 549 - DNA, 30 bp, Fusarium beomiforme
  source 1..30: mol_type = other DNA
tggtgcacctggcgcggacaaccgtgctgg

SEQ ID NO: 550 - DNA, 30 bp, Fusarium beomiforme; identical to SEQ ID NO: 376
  source 1..30: mol_type = other DNA

SEQ ID NO: 551 - DNA, 30 bp, Fusarium beomiforme
  source 1..30: mol_type = other DNA
tggtgcctctggcgcggacaaccttgctgg

SEQ ID NO: 552 - DNA, 30 bp, Colletotrichum fructicola
  source 1..30: mol_type = other DNA
tggtgcaccaagcccggccagccatgctgg

SEQ ID NO: 553 - DNA, 30 bp, Fusarium acutatum
  source 1..30: mol_type = other DNA
tggtgcatgtggcgaggacagccatgctgg

SEQ ID NO: 554 - DNA, 30 bp, Fusarium acutatum
  source 1..30: mol_type = other DNA
tggtgtacttggcgtggacagccctgctgg

SEQ ID NO: 555 - DNA, 30 bp, Fusarium austroafricanum
  source 1..30: mol_type = other DNA
tggtgctcctggaagggccagccttgctgg

SEQ ID NO: 556 - DNA, 30 bp, Fusarium albosuccineum
  source 1..30: mol_type = other DNA
tggtgcatctggcctggccaaccctgctgg

SEQ ID NO: 557 - DNA, 30 bp, Fusarium albosuccineum
  source 1..30: mol_type = other DNA
tggtgctggtggcccggtcagccttgctgg

SEQ ID NO: 558 - DNA, 24 bp, Fusarium albosuccineum
  source 1..24: mol_type = other DNA
tggtgctggtggcccggtcagcct

SEQ ID NO: 559 - DNA, 30 bp, Fusarium albosuccineum
  source 1..30: mol_type = other DNA
tggtgtgtctggcccggtcagccctgctgg

SEQ ID NO: 560 - DNA, 30 bp, Colletotrichum fructicola; identical to SEQ ID NO: 528
  source 1..30: mol_type = other DNA; strain = Nara gc5

SEQ ID NO: 561 - DNA, 30 bp, Fusarium agapanthi
  source 1..30: mol_type = other DNA
tggtgtacttggcgtggacaaccctgctgg

SEQ ID NO: 562 - DNA, 30 bp, Fusarium agapanthi; identical to SEQ ID NO: 453
  source 1..30: mol_type = other DNA

SEQ ID NO: 563 - DNA, 30 bp, Colletotrichum siamense
  source 1..30: mol_type = other DNA
tggtgcacgaagcctggccagccttgctgg

SEQ ID NO: 564 - DNA, 30 bp, Colletotrichum tropicale
  source 1..30: mol_type = other DNA
tggtgcaccaagcccggccaaccgtgctgg

SEQ ID NO: 565 - DNA, 30 bp, Colletotrichum siamense; identical to SEQ ID NO: 528
  source 1..30: mol_type = other DNA

SEQ ID NO: 566 - DNA, 30 bp, Colletotrichum siamense; identical to SEQ ID NO: 530
  source 1..30: mol_type = other DNA

SEQ ID NO: 567 - DNA, 30 bp, Colletotrichum siamense
  source 1..30: mol_type = other DNA
tggtgtaccaagcccggacagccatgctgg

SEQ ID NO: 568 - DNA, 30 bp, Colletotrichum fructicola; identical to SEQ ID NO: 552
  source 1..30: mol_type = other DNA

SEQ ID NO: 569 - DNA, 30 bp, Colletotrichum fructicola; identical to SEQ ID NO: 528
  source 1..30: mol_type = other DNA

SEQ ID NO: 570 - DNA, 30 bp, Colletotrichum viniferum
  source 1..30: mol_type = other DNA
tggtgcaccgagcccggccagccctgctgg

SEQ ID NO: 571 - DNA, 30 bp, Colletotrichum viniferum
  source 1..30: mol_type = other DNA
tggtgcactaagcccggccagccctgctgg

SEQ ID NO: 572 - DNA, 30 bp, Colletotrichum fructicola; identical to SEQ ID NO: 552
  source 1..30: mol_type = other DNA

SEQ ID NO: 573 - DNA, 30 bp, Fusarium gaditjirri
  source 1..30: mol_type = other DNA
tggtgcacctggaggggccaaccctgttgg

SEQ ID NO: 574 - DNA, 30 bp, Fusarium gaditjirri
  source 1..30: mol_type = other DNA
tggtgcttgtggcgtggccagccttgctgg

SEQ ID NO: 575 - DNA, 30 bp, Fusarium zealandicum
  source 1..30: mol_type = other DNA
tggtgtacccgccctggccagtcctgctgg

SEQ ID NO: 576 - DNA, 30 bp, Fusarium decemcellulare
  source 1..30: mol_type = other DNA
tggtgcatctggcctggccagccctgctgg

SEQ ID NO: 577 - DNA, 30 bp, Fusarium decemcellulare
  source 1..30: mol_type = other DNA
tggtgcgtttggcctggccagccttgctgg

SEQ ID NO: 578 - DNA, 30 bp, Fusarium decemcellulare
  source 1..30: mol_type = other DNA
tggtgctggtggcccggccagccttgctgg

SEQ ID NO: 579 - DNA, 30 bp, Fusarium heterosporum
  source 1..30: mol_type = other DNA
tggtgcacaatgccgggacagccatgctgg

SEQ ID NO: 580 - DNA, 30 bp, Metarhizium anisopliae
  source 1..30: mol_type = other DNA
tggtgcggccggcccggacaaccctgctgg

SEQ ID NO: 581 - DNA, 30 bp, Metarhizium anisopliae
  source 1..30: mol_type = other DNA
tggtgctggaggccaggtcaaccatgttgg

SEQ ID NO: 582 - DNA, 30 bp, Fusarium anthophilum
  source 1..30: mol_type = other DNA
tggtgcacatggcgcggacagccctgctgg

SEQ ID NO: 583 - DNA, 30 bp, Fusarium anthophilum
  source 1..30: mol_type = other DNA
tggtgcatgtggcgcggacaaccctgctgg

SEQ ID NO: 584 - DNA, 30 bp, Fusarium austroamericanum; identical to SEQ ID NO: 363
  source 1..30: mol_type = other DNA

SEQ ID NO: 585 - DNA, 30 bp, Fusarium austroamericanum; identical to SEQ ID NO: 364
  source 1..30: mol_type = other DNA

SEQ ID NO: 586 - DNA, 30 bp, Fusarium oxysporum; identical to SEQ ID NO: 420
  source 1..30: mol_type = other DNA

SEQ ID NO: 587 - DNA, 30 bp, Fusarium oxysporum; identical to SEQ ID NO: 443
  source 1..30: mol_type = other DNA

SEQ ID NO: 588 - DNA, 30 bp, Fusarium oxysporum; identical to SEQ ID NO: 464
  source 1..30: mol_type = other DNA

SEQ ID NO: 589 - DNA, 30 bp, Colletotrichum fructicola; identical to SEQ ID NO: 552
  source 1..30: mol_type = other DNA

SEQ ID NO: 590 - DNA, 30 bp, Colletotrichum siamense
  source 1..30: mol_type = other DNA
tggtgtaccaagcccggccaaccgtgctgg

SEQ ID NO: 591 - DNA, 30 bp, Colletotrichum aenigma; identical to SEQ ID NO: 564
  source 1..30: mol_type = other DNA

SEQ ID NO: 592 - DNA, 30 bp, Fusarium phyllophilum
  source 1..30: mol_type = other DNA
tggtgcacttggcgtggacagccctgctgg

SEQ ID NO: 593 - DNA, 30 bp, Fusarium phyllophilum
  source 1..30: mol_type = other DNA
tggtgcatgtggcgaggtcagccttgctgg

SEQ ID NO: 594 - DNA, 30 bp, Fusarium mexicanum
  source 1..30: mol_type = other DNA
tggtgcacctggcgaggccagccatgctgg

SEQ ID NO: 595 - DNA, 30 bp, Fusarium mexicanum
  source 1..30: mol_type = other DNA
tggtgcatgtggcgtggccagccatgctgg

SEQ ID NO: 596 - DNA, 30 bp, Fusarium napiforme; identical to SEQ ID NO: 593
  source 1..30: mol_type = other DNA

SEQ ID NO: 597 - DNA, 30 bp, Fusarium napiforme
  source 1..30: mol_type = other DNA
tggtgtacctggagaggtcagccttgctgg

SEQ ID NO: 598 - DNA, 30 bp, Fusarium pseudocircinatum
  source 1..30: mol_type = other DNA
tggtgcacctggaggggccaaccctgctgg

SEQ ID NO: 599 - DNA, 30 bp, Fusarium pseudocircinatum
  source 1..30: mol_type = other DNA
tggtgcatgtggcgtggtcagccctgctgg

SEQ ID NO: 600 - DNA, 30 bp, Fusarium pseudoanthophilum
  source 1..30: mol_type = other DNA
tggtgtacctggcgaggacaaccctgttgg

SEQ ID NO: 601 - DNA, 30 bp, Fusarium pseudoanthophilum
  source 1..30: mol_type = other DNA
tggtgtatgtggcgcggacaaccctgctgg

SEQ ID NO: 602 - DNA, 30 bp, Fusarium subglutinans; identical to SEQ ID NO: 420
  source 1..30: mol_type = other DNA

SEQ ID NO: 603 - DNA, 30 bp, Fusarium subglutinans; identical to SEQ ID NO: 554
  source 1..30: mol_type = other DNA

SEQ ID NO: 604 - DNA, 30 bp, Fusarium sp.
  source 1..30: mol_type = other DNA; note = NRRL 52700
tggtgcacatggcccggtcagccctgctgg

SEQ ID NO: 605 - DNA, 30 bp, Fusarium sp.
  source 1..30: mol_type = other DNA; note = NRRL 52700
tggtgcacctggagaggccagccatgctgg

SEQ ID NO: 606 - DNA, 30 bp, Fusarium sp.; identical to SEQ ID NO: 453
  source 1..30: mol_type = other DNA; note = NRRL 52700

SEQ ID NO: 607 - DNA, 30 bp, Fusarium tjaetaba; identical to SEQ ID NO: 377
  source 1..30: mol_type = other DNA

SEQ ID NO: 608 - DNA, 30 bp, Fusarium tjaetaba
  source 1..30: mol_type = other DNA
tggtgcatgtggcgtggccagccctgctgg

SEQ ID NO: 609 - DNA, 30 bp, Fusarium sp.
  source 1..30: mol_type = other DNA; note = NRRL 25303
tggtgcacttggcgtggtcaaccttgctgg

SEQ ID NO: 610 - DNA, 30 bp, Fusarium sp.; identical to SEQ ID NO: 373
  source 1..30: mol_type = other DNA; note = NRRL 25303

SEQ ID NO: 611 - DNA, 30 bp, Fusarium denticulatum; identical to SEQ ID NO: 608
  source 1..30: mol_type = other DNA

SEQ ID NO: 612 - DNA, 30 bp, Fusarium denticulatum
  source 1..30: mol_type = other DNA
tggtgtacctggagaggacagccttgctgg

SEQ ID NO: 613 - DNA, 30 bp, Fusarium circinatum
  source 1..30: mol_type = other DNA
tggtgtacctggcgcggacagccctgctgg

SEQ ID NO: 614 - DNA, 30 bp, Fusarium circinatum; identical to SEQ ID NO: 453
  source 1..30: mol_type = other DNA

SEQ ID NO: 615 - DNA, 30 bp, Fusarium globosum; identical to SEQ ID NO: 377
  source 1..30: mol_type = other DNA

SEQ ID NO: 616 - DNA, 30 bp, Fusarium globosum
  source 1..30: mol_type = other DNA
tggtgtatgtggcgaggacaaccttgctgg

SEQ ID NO: 617 - DNA, 30 bp, Fusarium mundagurra
  source 1..30: mol_type = other DNA
tggtgtacctggcgcggacaaccctgttgg

SEQ ID NO: 618 - DNA, 30 bp, Fusarium mundagurra; identical to SEQ ID NO: 453
  source 1..30: mol_type = other DNA

SEQ ID NO: 619 - DNA, 30 bp, Botrytis fragariae
  source 1..30: mol_type = other DNA
tggtgcggacgccctggtcaaccatgcaag

SEQ ID NO: 620 - DNA, 27 bp, Botrytis fragariae
  source 1..27: mol_type = other DNA
tggtgcggacgtcccggacaaccttgc

SEQ ID NO: 621 - DNA, 30 bp, Fusarium coicis
  source 1..30: mol_type = other DNA
tggtgtacctggcgtggacaaccgtgctgg

SEQ ID NO: 622 - DNA, 30 bp, Fusarium coicis; identical to SEQ ID NO: 453
  source 1..30: mol_type = other DNA

SEQ ID NO: 623 - DNA, 30 bp, Fusarium bulbicola
  source 1..30: mol_type = other DNA
tggtgcacttggcgcggtcaaccttgctgg

SEQ ID NO: 624 - DNA, 30 bp, Fusarium bulbicola; identical to SEQ ID NO: 420
  source 1..30: mol_type = other DNA

SEQ ID NO: 625 - DNA, 30 bp, Fusarium oxysporum; identical to SEQ ID NO: 443
  source 1..30: mol_type = other DNA; note = f. sp. conglutinans

SEQ ID NO: 626 - DNA, 30 bp, Fusarium oxysporum; identical to SEQ ID NO: 422
  source 1..30: mol_type = other DNA; note = f. sp. conglutinans

SEQ ID NO: 627 - DNA, 30 bp, Fusarium oxysporum; identical to SEQ ID NO: 453
  source 1..30: mol_type = other DNA; note = f. sp. conglutinans

SEQ ID NO: 628 - DNA, 30 bp, Ustilaginoidea virens; identical to SEQ ID NO: 497
  source 1..30: mol_type = other DNA

SEQ ID NO: 629 - DNA, 30 bp, Ustilaginoidea virens; identical to SEQ ID NO: 498
  source 1..30: mol_type = other DNA

SEQ ID NO: 630 - DNA, 30 bp, Ustilaginoidea virens; identical to SEQ ID NO: 499
  source 1..30: mol_type = other DNA

SEQ ID NO: 631 - DNA, 30 bp, Stachybotrys chartarum
  source 1..30: mol_type = other DNA; strain = IBT 7711
tggtgcacgcgccccggccagccgtgctgg

SEQ ID NO: 632 - DNA, 30 bp, Stachybotrys chartarum
  source 1..30: mol_type = other DNA; strain = IBT 7711
tggtgcgtccgtcccggccagccgtgctgg

SEQ ID NO: 633 - DNA, 30 bp, Stachybotrys chartarum; identical to SEQ ID NO: 631
  source 1..30: mol_type = other DNA; strain = IBT 40293

SEQ ID NO: 634 - DNA, 30 bp, Stachybotrys chartarum; identical to SEQ ID NO: 632
  source 1..30: mol_type = other DNA; strain = IBT 40293

SEQ ID NO: 635 - DNA, 30 bp, Stachybotrys chlorohalonata; identical to SEQ ID NO: 631
  source 1..30: mol_type = other DNA; strain = IBT 40285

SEQ ID NO: 636 - DNA, 30 bp, Stachybotrys chlorohalonata; identical to SEQ ID NO: 632
  source 1..30: mol_type = other DNA; strain = IBT 40285

SEQ ID NO: 637 - DNA, 30 bp, Stachybotrys chartarum
  source 1..30: mol_type = other DNA; strain = IBT 40288
tggtgcacgcgccccggccagccatgctgg

SEQ ID NO: 638 - DNA, 30 bp, Stachybotrys chartarum; identical to SEQ ID NO: 632
  source 1..30: mol_type = other DNA; strain = IBT 40288

SEQ ID NO: 639 - DNA, 30 bp, Metarhizium anisopliae; identical to SEQ ID NO: 400
  source 1..30: mol_type = other DNA

SEQ ID NO: 640 - DNA, 30 bp, Metarhizium anisopliae; identical to SEQ ID NO: 401
  source 1..30: mol_type = other DNA

SEQ ID NO: 641 - DNA, 30 bp, Metarhizium anisopliae
  source 1..30: mol_type = other DNA
tggtgctgggcgccgggtcaaccatgttgg

SEQ ID NO: 642 - DNA, 27 bp, Pseudogymnoascus sp.
  source 1..27: mol_type = other DNA; note = VKM-3557
tgctggcgtccaggccagccatgcgga

SEQ ID NO: 643 - DNA, 27 bp, Pseudogymnoascus sp.
  source 1..27: mol_type = other DNA; note = VKM F-3775
tgctggcgccccggccagccatgcggc

SEQ ID NO: 644 - DNA, 27 bp, Pseudogymnoascus sp.
  source 1..27: mol_type = other DNA; note = VKM F-4514 (FW-929)
tgctggcgtccaggtcaaccatgtggc

SEQ ID NO: 645 - DNA, 27 bp, Pseudogymnoascus sp.
  source 1..27: mol_type = other DNA; note = VKM F-4516 (FW-969)
tgctggcgtccaggccagccatgcgga

SEQ ID NO: 646 - DNA, 27 bp, Pseudogymnoascus sp.
  source 1..27: mol_type = other DNA; note = VKM F-4515 (FW-2607)
tgctggcgccctggccagccctgcggg

SEQ ID NO: 647 - DNA, 27 bp, Pseudogymnoascus sp.
  source 1..27: mol_type = other DNA; note = VKM F-103
tgctggcgtccaggccagccgtgcggc

SEQ ID NO: 648 - DNA, 27 bp, Pseudogymnoascus sp.
  source 1..27: mol_type = other DNA; note = VKM F-4517 (FW-2822)
tgctggcgccctggccagccctgcggg

SEQ ID NO: 649 - DNA, 27 bp, Pseudogymnoascus sp.
  source 1..27: mol_type = other DNA; note = VKM F-4518 (FW-2643)
tgctggcgccccggtcagccatgcggt

SEQ ID NO: 650 - DNA, 27 bp, Pseudogymnoascus sp.
  source 1..27: mol_type = other DNA; note = VKM F-4519 (FW-2642)
tgctggcgccctggccagccatgtggc

SEQ ID NO: 651 - DNA, 27 bp, Pseudogymnoascus sp.
  source 1..27: mol_type = other DNA; note = VKM F-4520 (FW-2644)
tgctggcgtcccggacagccctgcggc

SEQ ID NO: 652 - DNA, 30 bp, Beauveria bassiana; identical to SEQ ID NO: 431
  source 1..30: mol_type = other DNA; strain = D1-5

SEQ ID NO: 653 - DNA, 30 bp, Metarhizium album
  source 1..30: mol_type = other DNA; strain = ARSEF 1941
tggtgctggcggccaggcgagccatgctgg

SEQ ID NO: 654 - DNA, 30 bp, Metarhizium album
  source 1..30: mol_type = other DNA; strain = ARSEF 1941
tggtgctggcggccgggcatgccttgctgg

SEQ ID NO: 655 - DNA, 30 bp, Metarhizium anisopliae; identical to SEQ ID NO: 400
  source 1..30: mol_type = other DNA; strain = ARSEF 549

SEQ ID NO: 656 - DNA, 30 bp, Metarhizium anisopliae; identical to SEQ ID NO: 401
  source 1..30: mol_type = other DNA; strain = ARSEF 549

SEQ ID NO: 657 - DNA, 30 bp, Metarhizium anisopliae; identical to SEQ ID NO: 641
  source 1..30: mol_type = other DNA; strain = ARSEF 549

SEQ ID NO: 658 - DNA, 30 bp, Metarhizium brunneum; identical to SEQ ID NO: 580
  source 1..30: mol_type = other DNA; strain = ARSEF 3297

SEQ ID NO: 659 - DNA, 30 bp, Metarhizium brunneum; identical to SEQ ID NO: 581
  source 1..30: mol_type = other DNA; strain = ARSEF 3297

SEQ ID NO: 660 - DNA, 30 bp, Metarhizium guizhouense
  source 1..30: mol_type = other DNA; strain = ARSEF 977
tggtgcggcgcgccaggacaaccctgctgg

SEQ ID NO: 661 - DNA, 30 bp, Metarhizium guizhouense; identical to SEQ ID NO: 400
  source 1..30: mol_type = other DNA; strain = ARSEF 977

SEQ ID NO: 662 - DNA, 30 bp, Metarhizium guizhouense; identical to SEQ ID NO: 401
  source 1..30: mol_type = other DNA; strain = ARSEF 977

SEQ ID NO: 663 - DNA, 30 bp, Metarhizium majus
  source 1..30: mol_type = other DNA; strain = ARSEF 297
tggtgcggcgcgcccggacaaccctgctgg

SEQ ID NO: 664 - DNA, 30 bp, Metarhizium majus; identical to SEQ ID NO: 400
  source 1..30: mol_type = other DNA; strain = ARSEF 297

SEQ ID NO: 665 - DNA, 30 bp, Metarhizium majus; identical to SEQ ID NO: 401
  source 1..30: mol_type = other DNA; strain = ARSEF 297

SEQ ID NO: 666 - DNA, 30 bp, Metarhizium anisopliae
  source 1..30: mol_type = other DNA; strain = BRIP 53293
tggtgctggcggcctggccaaccttgctgg

SEQ ID NO: 667 - DNA, 30 bp, Metarhizium anisopliae; identical to SEQ ID NO: 641
  source 1..30: mol_type = other DNA; strain = BRIP 53293

SEQ ID NO: 668 - DNA, 30 bp, Metarhizium anisopliae; identical to SEQ ID NO: 666
  source 1..30: mol_type = other DNA; strain = BRIP 53284

SEQ ID NO: 669 - DNA, 30 bp, Metarhizium anisopliae; identical to SEQ ID NO: 641
  source 1..30: mol_type = other DNA; strain = BRIP 53284

SEQ ID NO: 670 - DNA, 30 bp, Diaporthe ampelina
  source 1..30: mol_type = other DNA
tggtgcttctggaagggccaggggtgctgg

SEQ ID NO: 671 - DNA, 30 bp, Fusarium fujikuroi; identical to SEQ ID NO: 376
  source 1..30: mol_type = other DNA

SEQ ID NO: 672 - DNA, 30 bp, Fusarium fujikuroi; identical to SEQ ID NO: 597
  source 1..30: mol_type = other DNA

SEQ ID NO: 673 - DNA, 30 bp, Fusarium fujikuroi; identical to SEQ ID NO: 592
  source 1..30: mol_type = other DNA

SEQ ID NO: 674 - DNA, 30 bp, Fusarium fujikuroi; identical to SEQ ID NO: 378
  source 1..30: mol_type = other DNA

SEQ ID NO: 675 - DNA, 30 bp, Fusarium fujikuroi; identical to SEQ ID NO: 609
  source 1..30: mol_type = other DNA

SEQ ID NO: 676 - DNA, 30 bp, Fusarium oxysporum; identical to SEQ ID NO: 421
  source 1..30: mol_type = other DNA; note = f. sp. lycopersici 4287

SEQ ID NO: 677 - DNA, 30 bp, Fusarium oxysporum; identical to SEQ ID NO: 461
  source 1..30: mol_type = other DNA; note = f. sp. lycopersici 4287

SEQ ID NO: 678 - DNA, 30 bp, Fusarium oxysporum; identical to SEQ ID NO: 453
  source 1..30: mol_type = other DNA; note = f. sp. lycopersici 4287

SEQ ID NO: 679 - DNA, 33 bp, unidentified; identical to SEQ ID NO: 506
  misc_feature 1..33: note = Candida
  source 1..33: mol_type = other DNA

SEQ ID NO: 680 - DNA, 33 bp, unidentified
  misc_feature 1..33: note = Candida
  source 1..33: mol_type = other DNA
tggggctggttaagattctttccaggtgagcct

SEQ ID NO: 681 - DNA, 39 bp, Saccharomyces eubayanus
  source 1..39: mol_type = other DNA
tggcactggttgaaattaagacctggtcaaccaatgtat

SEQ ID NO: 682 - DNA, 39 bp, Saccharomyces eubayanus
  source 1..39: mol_type = other DNA
tggcactggttgacattgagacctggtcaaccaatgtac

SEQ ID NO: 683 - DNA, 39 bp, Saccharomyces eubayanus
  source 1..39: mol_type = other DNA
tggcactggctgaagttgagacctggtcaaccaatgtac

SEQ ID NO: 684 - DNA, 39 bp, Saccharomyces eubayanus
  source 1..39: mol_type = other DNA
tggcactggctgcaattgagacctggccaaccaatgtac

SEQ ID NO: 685 - DNA, 39 bp, Saccharomyces sp.; identical to SEQ ID NO: 12
  source 1..39: mol_type = other DNA; note = 'boulardii'

SEQ ID NO: 686 - DNA, 39 bp, Saccharomyces sp.; identical to SEQ ID NO: 8
  source 1..39: mol_type = other DNA; note = 'boulardii'

SEQ ID NO: 687 - DNA, 39 bp, Saccharomyces sp.; identical to SEQ ID NO: 9
  source 1..39: mol_type = other DNA; note = 'boulardii'

SEQ ID NO: 688 - DNA, 30 bp, Escovopsis weberi
  source 1..30: mol_type = other DNA
tggtgcaccaaccccggccagggctgctgg

SEQ ID NO: 689 - DNA, 30 bp, Fusarium langsethiae
  source 1..30: mol_type = other DNA
tggtgcacctggaagggtcagccatgctgg

SEQ ID NO: 690 - DNA, 30 bp, Fusarium langsethiae; identical to SEQ ID NO: 362
  source 1..30: mol_type = other DNA

SEQ ID NO: 691 - DNA, 39 bp, Saccharomyces sp.; identical to SEQ ID NO: 12
  source 1..39: mol_type = other DNA; note = 'boulardii'

SEQ ID NO: 692 - DNA, 39 bp, Saccharomyces sp.; identical to SEQ ID NO: 8
  source 1..39: mol_type = other DNA; note = 'boulardii'

SEQ ID NO: 693 - DNA, 39 bp, Saccharomyces sp.; identical to SEQ ID NO: 9
  source 1..39: mol_type = other DNA; note = 'boulardii'

SEQ ID NO: 694 - DNA, 30 bp, Drechmeria coniospora
  source 1..30: mol_type = other DNA
tggtgcacccgtcccggaagcggatgctgg

SEQ ID NO: 695 - DNA, 39 bp, Saccharomyces cerevisiae; identical to SEQ ID NO: 185
  source 1..39: mol_type = other DNA

SEQ ID NO: 696 - DNA, 39 bp, Saccharomyces cerevisiae; identical to SEQ ID NO: 10
  source 1..39: mol_type = other DNA

SEQ ID NO: 697 - DNA, 39 bp, Saccharomyces cerevisiae; identical to SEQ ID NO: 9
  source 1..39: mol_type = other DNA

SEQ ID NO: 698 - DNA, 30 bp, Metarhizium rileyi
  source 1..30: mol_type = other DNA; strain = RCEF 4871
tggtgttggcgaccgggacagccttgctgg

SEQ ID NO: 699 - DNA, 27 bp, Pseudogymnoascus destructans
  source 1..27: mol_type = other DNA
tgctggcgtccagggcagccatgtggc

SEQ ID NO: 700 - DNA, 27 bp, Pochonia chlamydosporia
  source 1..27: mol_type = other DNA; strain = 170
tggtgctggaggcctggcgagccgtgc

SEQ ID NO: 701 - DNA, 30 bp, Pochonia chlamydosporia
  source 1..30: mol_type = other DNA; strain = 170
tggtgctggcgtccaggccagtcctgctgg

SEQ ID NO: 702 - DNA, 30 bp, Pochonia chlamydosporia
  source 1..30: mol_type = other DNA; strain = 170
tggtgttggagacccggccagccatgctgg

SEQ ID NO: 703 - DNA, 30 bp, Purpureocillium lilacinum
  source 1..30: mol_type = other DNA
tggtgcactcgccccggtcagccctgcaag

SEQ ID NO: 704 - DNA, 30 bp, Purpureocillium lilacinum
  source 1..30: mol_type = other DNA
tggtgcactcgccgcggccagccttgcaag

SEQ ID NO: 705 - DNA, 30 bp, Purpureocillium lilacinum
  source 1..30: mol_type = other DNA
tggtgcactcgccccggccagccctgcaag

SEQ ID NO: 706 - DNA, 30 bp, Purpureocillium lilacinum
  source 1..30: mol_type = other DNA
tggtgcactcgccgaggccaaccttgcaag

SEQ ID NO: 707 - DNA, 33 bp, Metschnikowia bicuspidata
  source 1..33: mol_type = other DNA; variety = var. bicuspidata NRRL YB-4993
tggcattgggttagattgaagattggccagcct

SEQ ID NO: 708 - DNA, 33 bp, Metschnikowia bicuspidata
  source 1..33: mol_type = other DNA; variety = var. bicuspidata NRRL YB-4993
tggcattgggttgctttgaagattggccagccc

SEQ ID NO: 709 - DNA, 39 bp, Metschnikowia bicuspidata
  source 1..39: mol_type = other DNA; variety = var. bicuspidata NRRL YB-4993
tggcactgggttgctttgaaaattggacaaccattcttc

SEQ ID NO: 710 - DNA, 33 bp, Metschnikowia bicuspidata
  source 1..33: mol_type = other DNA; variety = var. bicuspidata NRRL YB-4993
tggcactgggttgctttgaaaattggacaacca

SEQ ID NO: 711 - DNA, 30 bp, Fusarium poae
  source 1..30: mol_type = other DNA
tggtgcacctggaagggacagccctgctgg

SEQ ID NO: 712 - DNA, 30 bp, Fusarium poae; identical to SEQ ID NO: 449
  source 1..30: mol_type = other DNA

SEQ ID NO: 713 - DNA, 27 bp, Pseudogymnoascus sp.
  source 1..27: mol_type = other DNA; note = WSF 3629
tgctggcgccccggccagccctgtggc

SEQ ID NO: 714 - DNA, 27 bp, Pseudogymnoascus sp.
  source 1..27: mol_type = other DNA; note = 24MN13
tgctggcgtcctggccagccatgcggc

SEQ ID NO: 715 - DNA, 27 bp, Pseudogymnoascus sp.
  source 1..27: mol_type = other DNA; note = 23342-1-I1
tgctggcgccccggtcagccatgcggc

SEQ ID NO: 716 - DNA, 27 bp, Pseudogymnoascus sp.
  source 1..27: mol_type = other DNA; note = 05NY08
tgctggcgccctggccagccatgtggc

SEQ ID NO: 717 - DNA, 27 bp, Pseudogymnoascus sp.
  source 1..27: mol_type = other DNA; note = 03VT05
tgctggcgtcctggccagccatgtggt

SEQ ID NO: 718 - DNA, 27 bp, Pseudogymnoascus verrucosus
  source 1..27: mol_type = other DNA
tgctggcgccccggccagccctgcggc

SEQ ID NO: 719 - DNA, 30 bp, Drechmeria coniospora
  source 1..30: mol_type = other DNA
tggtgcactcgccccggaagtggttgctgg

SEQ ID NO: 720 - DNA, 39 bp, Hanseniaspora osmophila
  source 1..39: mol_type = other DNA
tggcactggttgaaatttgacgttggtgaaccattgtac

SEQ ID NO: 721 - DNA, 39 bp, Hanseniaspora osmophila
  source 1..39: mol_type = other DNA
tggcactggttgaaatttgaygttggtgaaccattgtac

SEQ ID NO: 722 - DNA, 27 bp, Penicilliopsis zonata
  source 1..27: mol_type = other DNA; strain = CBS 506.65
tggtgctggcagcctggtcagggttgc

SEQ ID NO: 723 - DNA, 39 bp, Saccharomyces cerevisiae; identical to SEQ ID NO: 10
  source 1..39: mol_type = other DNA

SEQ ID NO: 724 - DNA, 39 bp, Saccharomyces cerevisiae; identical to SEQ ID NO: 9
  source 1..39: mol_type = other DNA

SEQ ID NO: 725 - DNA, 39 bp, Saccharomyces cerevisiae; identical to SEQ ID NO: 194
  source 1..39: mol_type = other DNA

SEQ ID NO: 726 - DNA, 30 bp, Fusarium graminearum; identical to SEQ ID NO: 361
  source 1..30: mol_type = other DNA

SEQ ID NO: 727 - DNA, 30 bp, Fusarium graminearum; identical to SEQ ID NO: 362
  source 1..30: mol_type = other DNA

SEQ ID NO: 728 - DNA, 30 bp, Fusarium oxysporum; identical to SEQ ID NO: 421
  source 1..30: mol_type = other DNA; note = f. sp. radicis-cucumerinum

SEQ ID NO: 729 - DNA, 30 bp, Fusarium oxysporum; identical to SEQ ID NO: 468
  source 1..30: mol_type = other DNA; note = f. sp. radicis-cucumerinum

SEQ ID NO: 730 - DNA, 30 bp, Fusarium oxysporum; identical to SEQ ID NO: 453
  source 1..30: mol_type = other DNA; note = f. sp. radicis-cucumerinum

SEQ ID NO: 731 - DNA, 33 bp, unidentified; identical to SEQ ID NO: 506
  misc_feature 1..33: note = Candida
  source 1..33: mol_type = other DNA

SEQ ID NO: 732 - DNA, 33 bp, unidentified
  misc_feature 1..33: note = Candida
  source 1..33: mol_type = other DNA
tggggttggttaaggttcttccccggcgaacca

SEQ ID NO: 733 - DNA, 33 bp, unidentified; identical to SEQ ID NO: 506
  misc_feature 1..33: note = Candida
  source 1..33: mol_type = other DNA

SEQ ID NO: 734 - DNA, 33 bp, unidentified
  misc_feature 1..33: note = Candida
  source 1..33: mol_type = other DNA
tggggctggttgagatttttcccaggtgagcca

SEQ ID NO: 735 - DNA, 39 bp, Saccharomyces cerevisiae; identical to SEQ ID NO: 10
  source 1..39: mol_type = other DNA

SEQ ID NO: 736 - DNA, 39 bp, Saccharomyces cerevisiae; identical to SEQ ID NO: 9
  source 1..39: mol_type = other DNA

SEQ ID NO: 737 - DNA, 39 bp, Saccharomyces cerevisiae; identical to SEQ ID NO: 185
  source 1..39: mol_type = other DNA

SEQ ID NO: 738 - DNA, 30 bp, Beauveria bassiana
  source 1..30: mol_type = other DNA
tggtgcatgagacccggccagccatgctgg

SEQ ID NO: 739 - DNA, 30 bp, Verticillium dahliae; identical to SEQ ID NO: 542
  source 1..30: mol_type = other DNA

SEQ ID NO: 740 - DNA, 30 bp, Verticillium dahliae; identical to SEQ ID NO: 423
  source 1..30: mol_type = other DNA

SEQ ID NO: 741 - DNA, 30 bp, Verticillium dahliae; identical to SEQ ID NO: 423
  source 1..30: mol_type = other DNA

SEQ ID NO: 742 - DNA, 30 bp, Verticillium dahliae; identical to SEQ ID NO: 423
  source 1..30: mol_type = other DNA

SEQ ID NO: 743 - DNA, 30 bp, Verticillium dahliae; identical to SEQ ID NO: 423
  source 1..30: mol_type = other DNA

SEQ ID NO: 744 - DNA, 30 bp, Fusarium nygamai; identical to SEQ ID NO: 598
  source 1..30: mol_type = other DNA

SEQ ID NO: 745 - DNA, 30 bp, Fusarium nygamai; identical to SEQ ID NO: 608
  source 1..30: mol_type = other DNA

SEQ ID NO: 746 - DNA, 27 bp, Rutstroemia sp.
  source 1..27: mol_type = other DNA; note = NJR-2017a BVV2
tggtgcggacgcccaggacagccatgc

SEQ ID NO: 747 - DNA, 30 bp, Rutstroemia sp.
  source 1..30: mol_type = other DNA; note = NJR-2017a BVV2
tggtgcggccgccccggccaaccctgcaaa

SEQ ID NO: 748 - DNA, 30 bp, Rutstroemia sp.
  source 1..30: mol_type = other DNA; note = NJR-2017a BBW
tggtgcggacgcccaggacagccctgcaag

SEQ ID NO: 749 - DNA, 27 bp, Rutstroemia sp.
  source 1..27: mol_type = other DNA; note = NJR-2017a BBW
tggtgcggacgccccgggcagccttgc

SEQ ID NO: 750 - DNA, 27 bp, Rutstroemia sp.
  source 1..27: mol_type = other DNA; note = NJR-2017a WRK4
tggtgcggacgcccaggacagccctgc

SEQ ID NO: 751 - DNA, 30 bp, Rutstroemia sp.
  source 1..30: mol_type = other DNA; note = NJR-2017a WRK4
tggtgcggccgtcccggacaaccgtgcaag

SEQ ID NO: 752 - DNA, 33 bp, unidentified
  misc_feature 1..33: note = Candida
  source 1..33: mol_type = other DNA
tggggctggttgagattcatgccaggcgaacca

SEQ ID NO: 753 - DNA, 33 bp, unidentified; identical to SEQ ID NO: 506
  misc_feature 1..33: note = Candida
  source 1..33: mol_type = other DNA

SEQ ID NO: 754 - DNA, 30 bp, unidentified
  misc_feature 1..30: note = Candida
  source 1..30: mol_type = other DNA
tggggctggttgagattctttccaggtgag

SEQ ID NO: 755 - DNA, 33 bp, unidentified; identical to SEQ ID NO: 734
  misc_feature 1..33: note = Candida
  source 1..33: mol_type = other DNA

SEQ ID NO: 756 - DNA, 30 bp, Fusarium culmorum; identical to SEQ ID NO: 449
  source 1..30: mol_type = other DNA

SEQ ID NO: 757 - DNA, 30 bp, Fusarium culmorum
  source 1..30: mol_type = other DNA
tggtgtacctggaaaggccagccttgctgg

SEQ ID NO: 758 - DNA, 39 bp, Saccharomyces cerevisiae; identical to SEQ ID NO: 8
  source 1..39: mol_type = other DNA

SEQ ID NO: 759 - DNA, 39 bp, Saccharomyces cerevisiae; identical to SEQ ID NO: 9
  source 1..39: mol_type = other DNA

SEQ ID NO: 760 - DNA, 39 bp, Saccharomyces cerevisiae; identical to SEQ ID NO: 8
  source 1..39: mol_type = other DNA

SEQ ID NO: 761 - DNA, 39 bp, Saccharomyces cerevisiae; identical to SEQ ID NO: 9
  source 1..39: mol_type = other DNA

SEQ ID NO: 762 - DNA, 39 bp, Saccharomyces cerevisiae; identical to SEQ ID NO: 185
  source 1..39: mol_type = other DNA

SEQ ID NO: 763 - DNA, 39 bp, Saccharomyces cerevisiae; identical to SEQ ID NO: 7
  source 1..39: mol_type = other DNA

SEQ ID NO: 764 - DNA, 39 bp, Saccharomyces cerevisiae; identical to SEQ ID NO: 8
  source 1..39: mol_type = other DNA

SEQ ID NO: 765 - DNA, 39 bp, Saccharomyces cerevisiae; identical to SEQ ID NO: 9
  source 1..39: mol_type = other DNA

SEQ ID NO: 766 - DNA, 39 bp, Saccharomyces cerevisiae; identical to SEQ ID NO: 12
  source 1..39: mol_type = other DNA

SEQ ID NO: 767 - DNA, 33 bp, unidentified
  misc_feature 1..33: note = Candida
  source 1..33: mol_type = other DNA
tggggctggttgagattcatgccaggtgagcct

SEQ ID NO: 768 - DNA, 33 bp, unidentified; identical to SEQ ID NO: 544
  misc_feature 1..33: note = Candida
  source 1..33: mol_type = other DNA

SEQ ID NO: 769 - DNA, 30 bp, Purpureocillium lilacinum; identical to SEQ ID NO: 705
  source 1..30: mol_type = other DNA

SEQ ID NO: 770 - DNA, 30 bp, Purpureocillium lilacinum; identical to SEQ ID NO: 704
  source 1..30: mol_type = other DNA

SEQ ID NO: 771 - DNA, 36 bp, Metschnikowia aff. pulcherrima
  source 1..36: mol_type = other DNA
tggcactggggaagattgagaatgggccagccagtt

SEQ ID NO: 772 - DNA, 39 bp, Metschnikowia aff. pulcherrima
  source 1..39: mol_type = other DNA
tggcactggggccgcttgagaatgggtcagcccttctac

SEQ ID NO: 773 - DNA, 39 bp, Metschnikowia aff. pulcherrima
  source 1..39: mol_type = other DNA
tggcactggggccgtttgagaatgggccagccaatgtac

SEQ ID NO: 774 - DNA, 33 bp, Metschnikowia aff. pulcherrima
  source 1..33: mol_type = other DNA
tggcattggggccgtttgagaatgggccagcca

SEQ ID NO: 775 - DNA, 30 bp, Pyricularia oryzae; identical to SEQ ID NO: 437
  source 1..30: mol_type = other DNA

SEQ ID NO: 776 - DNA, 33 bp, unidentified; identical to SEQ ID NO: 506
  misc_feature 1..33: note = Candida
  source 1..33: mol_type = other DNA

SEQ ID NO: 777 - DNA, 30 bp, unidentified; identical to SEQ ID NO: 754
  misc_feature 1..30: note = Candida
  source 1..30: mol_type = other DNA

SEQ ID NO: 778 - DNA, 33 bp, unidentified; identical to SEQ ID NO: 734
  misc_feature 1..33: note = Candida
  source 1..33: mol_type = other DNA

SEQ ID NO: 779 - DNA, 33 bp, unidentified; identical to SEQ ID NO: 506
  misc_feature 1..33: note = Candida
  source 1..33: mol_type = other DNA

SEQ ID NO: 780 - DNA, 33 bp, unidentified; identical to SEQ ID NO: 507
  misc_feature 1..33: note = Candida
  source 1..33: mol_type = other DNA

SEQ ID NO: 781 - DNA, 36 bp, Kluyveromyces lactis
  source 1..36: mol_type = other DNA
tggagttggattacattaagacctggtcaaccaatt

SEQ ID NO: 782 - DNA, 30 bp, Fusarium fujikuroi; identical to SEQ ID NO: 592
  source 1..30: mol_type = other DNA

SEQ ID NO: 783 - DNA, 30 bp, Fusarium fujikuroi; identical to SEQ ID NO: 376
  source 1..30: mol_type = other DNA

SEQ ID NO: 784 - DNA, 30 bp, Fusarium fujikuroi; identical to SEQ ID NO: 592
  source 1..30: mol_type = other DNA

SEQ ID NO: 785 - DNA, 30 bp, Fusarium fujikuroi; identical to SEQ ID NO: 376
  source 1..30: mol_type = other DNA

SEQ ID NO: 786 - DNA, 30 bp, Fusarium fujikuroi
  source 1..30: mol_type = other DNA
tggtgcatgtggcgaggacagccttgctgg

SEQ ID NO: 787 - DNA, 30 bp, Fusarium fujikuroi
  source 1..30: mol_type = other DNA
tggtgtacatggcgtggacagccctgctgg

SEQ ID NO: 788 - DNA, 39 bp, Kluyveromyces marxianus; identical to SEQ ID NO: 285
  source 1..39: mol_type = other DNA

SEQ ID NO: 789 - DNA, 36 bp, Kluyveromyces marxianus; identical to SEQ ID NO: 286
  source 1..36: mol_type = other DNA

SEQ ID NO: 790 - DNA, 39 bp, Kluyveromyces marxianus; identical to SEQ ID NO: 287
  source 1..39: mol_type = other DNA

SEQ ID NO: 791 - DNA, 36 bp, Kluyveromyces marxianus; identical to SEQ ID NO: 288
  source 1..36: mol_type = other DNA

SEQ ID NO: 792 - DNA, 39 bp, Kluyveromyces marxianus; identical to SEQ ID NO: 289
  source 1..39: mol_type = other DNA

SEQ ID NO: 793 - DNA, 36 bp, Kluyveromyces marxianus; identical to SEQ ID NO: 290
  source 1..36: mol_type = other DNA

SEQ ID NO: 794 - DNA, 33 bp, Kluyveromyces marxianus; identical to SEQ ID NO: 291
  source 1..33: mol_type = other DNA

SEQ ID NO: 795 - DNA, 39 bp, Kluyveromyces marxianus; identical to SEQ ID NO: 292
  source 1..39: mol_type = other DNA

SEQ ID NO: 796 - DNA, 33 bp, Kluyveromyces marxianus; identical to SEQ ID NO: 293
  source 1..33: mol_type = other DNA

SEQ ID NO: 797 - DNA, 33 bp, Kluyveromyces marxianus; identical to SEQ ID NO: 294
  source 1..33: mol_type = other DNA

SEQ ID NO: 798 - DNA, 33 bp, Kluyveromyces marxianus; identical to SEQ ID NO: 295
  source 1..33: mol_type = other DNA

SEQ ID NO: 799 - DNA, 39 bp, Saccharomyces cerevisiae; identical to SEQ ID NO: 8
  source 1..39: mol_type = other DNA

SEQ ID NO: 800 - DNA, 39 bp, Saccharomyces cerevisiae; identical to SEQ ID NO: 9
  source 1..39: mol_type = other DNA

SEQ ID NO: 801 - DNA, 39 bp, Saccharomyces cerevisiae; identical to SEQ ID NO: 7
  source 1..39: mol_type = other DNA

SEQ ID NO: 802 - DNA, 39 bp, Saccharomyces paradoxus
  source 1..39: mol_type = other DNA
tggcactggttgaatttgagacctggtcaacctatgtac

SEQ ID NO: 803 - DNA, 39 bp, Saccharomyces paradoxus
  source 1..39: mol_type = other DNA
tggcattggttgcaactcaaaccgggccaaccaatgtac

SEQ ID NO: 804 - DNA, 39 bp, Saccharomyces paradoxus
  source 1..39: mol_type = other DNA
tggcactggttgcaattgaaacctggtcaaccaatgtac

SEQ ID NO: 805 - DNA, 39 bp, Saccharomyces pastorianus; identical to SEQ ID NO: 10
  source 1..39: mol_type = other DNA

SEQ ID NO: 806 - DNA, 39 bp, Saccharomyces pastorianus; identical to SEQ ID NO: 9
  source 1..39: mol_type = other DNA

SEQ ID NO: 807 - DNA, 39 bp, Saccharomyces pastorianus
  source 1..39: mol_type = other DNA
tggcattggttgcagttaaagcctggccaaccaatgtac

SEQ ID NO: 808 - DNA, 39 bp, Saccharomyces pastorianus
  source 1..39: mol_type = other DNA
tggcattggttgcagtttaaacccggccaaccaatgtac

SEQ ID NO: 809 - DNA, 39 bp, Saccharomyces pastorianus; identical to SEQ ID NO: 683
  source 1..39: mol_type = other DNA

SEQ ID NO: 810 - DNA, 39 bp, Saccharomyces pastorianus
  source 1..39: mol_type = other DNA
tggcattggttgcaactaaggccaggccaaccaatgtac

SEQ ID NO: 811 - DNA, 39 bp, Saccharomyces pastorianus
  source 1..39: mol_type = other DNA
tggcactggttgaaattgagacctggtcaaccaatgtac

SEQ ID NO: 812 - DNA, 39 bp, Saccharomyces pastorianus; identical to SEQ ID NO: 682
  source 1..39: mol_type = other DNA

SEQ ID NO: 813 - DNA, 30 bp, Fusarium oxysporum
  source 1..30: mol_type = other DNA; strain = Fo47
tggtgcacttggcgcggacagccctgctgg

SEQ ID NO: 814 - DNA, 30 bp, Fusarium oxysporum; identical to SEQ ID NO: 420
  source 1..30: mol_type = other DNA; strain = Fo47

SEQ ID NO: 815 - DNA, 30 bp, Fusarium oxysporum; identical to SEQ ID NO: 421
  source 1..30: mol_type = other DNA; strain = Fo47

SEQ ID NO: 816 - DNA, 36 bp, Zygotorulaspora mrakii
  source 1..36: mol_type = other DNA
tggcattggattaggttgagcagaggcgctccaatc

SEQ ID NO: 817 - DNA, 36 bp, Zygotorulaspora mrakii
  source 1..36: mol_type = other DNA
tggcattggattcaattgggcaagggtgccccaatt

SEQ ID NO: 818 - DNA, 36 bp, Zygotorulaspora mrakii
  source 1..36: mol_type = other DNA
tggcattggattcgtttgggcagaggtgctccaatc

SEQ ID NO: 819 - DNA, 30 bp, Metarhizium brunneum; identical to SEQ ID NO: 580
  source 1..30: mol_type = other DNA

SEQ ID NO: 820 - DNA, 30 bp, Metarhizium brunneum; identical to SEQ ID NO: 581
  source 1..30: mol_type = other DNA

SEQ ID NO: 821 - DNA, 39 bp, Torulaspora globosa
  source 1..39: mol_type = other DNA
tggcactggatcagtctacgtgccggccagcctatgtat

SEQ ID NO: 822 - DNA, 36 bp, Torulaspora globosa
  source 1..36: mol_type = other DNA
tggcactggatcagtctacgtgccggccagcctatg

SEQ ID NO: 823 - DNA, 33 bp, Torulaspora globosa
  source 1..33: mol_type = other DNA
tggcactggatcagtctacgtgccggccagcct

SEQ ID NO: 824 - DNA, 39 bp, Torulaspora globosa
  source 1..39: mol_type = other DNA
tggcattggatctccttgcgtacaggacaaccaatgtac

SEQ ID NO: 825 - DNA, 36 bp, Torulaspora globosa
  source 1..36: mol_type = other DNA
tggcattggatctccttgcgtacaggacaaccaatg

SEQ ID NO: 826 - DNA, 33 bp, Torulaspora globosa
  source 1..33: mol_type = other DNA
tggcattggatctccttgcgtacaggacaacca

SEQ ID NO: 827 - DNA, 39 bp, Torulaspora globosa
  source 1..39: mol_type = other DNA
tggcattggatcagtctacgtaccggccagcctatgtat

SEQ ID NO: 828 - DNA, 36 bp, Torulaspora globosa
  source 1..36: mol_type = other DNA
tggcattggatcagtctacgtaccggccagcctatg

SEQ ID NO: 829 - DNA, 33 bp, Torulaspora globosa
  source 1..33: mol_type = other DNA
tggcattggatttcgttgcgcactggacaaccc

SEQ ID NO: 830 - DNA, 30 bp, Monilinia fructigena
  source 1..30: mol_type = other DNA
tggtgcggacgccctggtcaaggctgcaag

SEQ ID NO: 831 - DNA, 27 bp, Monilinia fructigena
  source 1..27: mol_type = other DNA
tggtgtggacgtcccggacaaggatgc

SEQ ID NO: 832 - DNA, 30 bp, Fusarium proliferatum; identical to SEQ ID NO: 376
  source 1..30: mol_type = other DNA

SEQ ID NO: 833 - DNA, 30 bp, Fusarium proliferatum
  source 1..30: mol_type = other DNA
tggtgtacctggcgtggtcagccttgctgg

SEQ ID NO: 834 - DNA, 30 bp, Verticillium dahliae; identical to SEQ ID NO: 423
  source 1..30: mol_type = other DNA

SEQ ID NO: 835 - DNA, 30 bp, Fusarium verticillioides
  source 1..30: mol_type = other DNA
tggtgcacatggcgcgggcagccctgctgg

SEQ ID NO: 836 - DNA, 30 bp, Fusarium verticillioides; identical to SEQ ID NO: 376
  source 1..30: mol_type = other DNA

SEQ ID NO: 837 - DNA, 27 bp, Fusarium coffeatum
  source 1..27: mol_type = other DNA
tggtgcacctggaagggccagccatgc

SEQ ID NO: 838 - DNA, 30 bp, Fusarium coffeatum
  source 1..30: mol_type = other DNA
tggtgcctctggaagggtcagccatgctgg

SEQ ID NO: 839 - DNA, 30 bp, Fusarium coffeatum; identical to SEQ ID NO: 364
  source 1..30: mol_type = other DNA

SEQ ID NO: 840 - DNA, 30 bp, Fusarium coffeatum
  source 1..30: mol_type = other DNA
tggtgtacttggaagggacagccttgctgg

SEQ ID NO: 841 - DNA, 30 bp, Fusarium flagelliforme
  source 1..30: mol_type = other DNA
tggtgctggatcaagggacaaccttgctgg

SEQ ID NO: 842 - DNA, 30 bp, Fusarium flagelliforme
  source 1..30: mol_type = other DNA
tggtgctggatcaaaggccagccttgctgg

SEQ ID NO: 843 - DNA, 30 bp, Fusarium sporotrichioides; identical to SEQ ID NO: 689
  source 1..30: mol_type = other DNA

SEQ ID NO: 844 - DNA, 30 bp, Fusarium sporotrichioides
  source 1..30: mol_type = other DNA
tggtgctggtggaagggccagccatgctgg

SEQ ID NO: 845 - DNA, 30 bp, Fusarium longipes
  source 1..30: mol_type = other DNA
tggtgcacctggaagggccagccttgctgg

SEQ ID NO: 846 - DNA, 30 bp, Fusarium longipes; identical to SEQ ID NO: 844
  source 1..30: mol_type = other DNA

SEQ ID NO: 847 - DNA, 30 bp, Fusarium oxysporum; identical to SEQ ID NO: 443
  source 1..30: mol_type = other DNA; note = f. sp. cepae

SEQ ID NO: 848 - DNA, 30 bp, Fusarium oxysporum; identical to SEQ ID NO: 464
  source 1..30: mol_type = other DNA; note = f. sp. cepae

SEQ ID NO: 849 - DNA, 30 bp, Fusarium oxysporum; identical to SEQ ID NO: 453
  source 1..30: mol_type = other DNA; note = f. sp. cepae

SEQ ID NO: 850 - DNA, 30 bp, Fusarium oxysporum; identical to SEQ ID NO: 420
  source 1..30: mol_type = other DNA; note = f. sp. cepae

SEQ ID NO: 851 - DNA, 30 bp, Fusarium oxysporum; identical to SEQ ID NO: 443
  source 1..30: mol_type = other DNA; note = f. sp. cepae

SEQ ID NO: 852 - DNA, 30 bp, Fusarium oxysporum; identical to SEQ ID NO: 464
  source 1..30: mol_type = other DNA; note = f. sp. cepae

SEQ ID NO: 853 - DNA, 30 bp, Fusarium oxysporum; identical to SEQ ID NO: 420
  source 1..30: mol_type = other DNA; note = f. sp. cepae

SEQ ID NO: 854 - DNA, 30 bp, Fusarium oxysporum; identical to SEQ ID NO: 443
  source 1..30: mol_type = other DNA; note = f. sp. cepae

SEQ ID NO: 855 - DNA, 30 bp, Fusarium oxysporum; identical to SEQ ID NO: 464
  source 1..30: mol_type = other DNA; note = f. sp. cepae

SEQ ID NO: 856 - DNA, 30 bp, Fusarium oxysporum; identical to SEQ ID NO: 420
  source 1..30: mol_type = other DNA

SEQ ID NO: 857 - DNA, 30 bp, Fusarium oxysporum
  source 1..30: mol_type = other DNA
tggtgcttgtggcgaggacagccatgctgg

SEQ ID NO: 858 - DNA, 30 bp, Fusarium oxysporum; identical to SEQ ID NO: 422
  source 1..30: mol_type = other DNA

SEQ ID NO: 859 - DNA, 30 bp, Fusarium oxysporum; identical to SEQ ID NO: 420
  source 1..30: mol_type = other DNA

SEQ ID NO: 860 - DNA, 30 bp, Fusarium oxysporum; identical to SEQ ID NO: 443
  source 1..30: mol_type = other DNA

SEQ ID NO: 861 - DNA, 30 bp, Fusarium oxysporum; identical to SEQ ID NO: 464
  source 1..30: mol_type = other DNA

SEQ ID NO: 862 - DNA, 30 bp, Fusarium oxysporum; identical to SEQ ID NO: 421
  source 1..30: mol_type = other DNA

SEQ ID NO: 863 - DNA, 30 bp, Fusarium oxysporum; identical to SEQ ID NO: 464
  source 1..30: mol_type = other DNA

SEQ ID NO: 864 - DNA, 30 bp, Fusarium oxysporum; identical to SEQ ID NO: 453
  source 1..30: mol_type = other DNA

SEQ ID NO: 865 - DNA, 30 bp, Fusarium oxysporum; identical to SEQ ID NO: 609
  source 1..30: mol_type = other DNA

SEQ ID NO: 866 - DNA, 30 bp, Fusarium oxysporum; identical to SEQ ID NO: 421
  source 1..30: mol_type = other DNA

SEQ ID NO: 867 - DNA, 30 bp, Fusarium oxysporum; identical to SEQ ID NO: 453
  source 1..30: mol_type = other DNA

SEQ ID NO: 868 - DNA, 30 bp, Fusarium proliferatum; identical to SEQ ID NO: 377
  source 1..30: mol_type = other DNA

SEQ ID NO: 869 - DNA, 30 bp, Fusarium proliferatum; identical to SEQ ID NO: 376
  source 1..30: mol_type = other DNA

SEQ ID NO: 870 - DNA, 30 bp, Coniochaeta pulveracea
  source 1..30: mol_type = other DNA
tggtgcccccacaagggccagccatgctgg

SEQ ID NO: 871 - DNA, 30 bp, Coniochaeta pulveracea
  source 1..30: mol_type = other DNA
tggtgcccccacccgggtcagccatgctgg

SEQ ID NO: 872 - DNA, 30 bp, Verticillium nonalfalfae
  source 1..30: mol_type = other DNA
ccgtgcccccgacctggacagggctgctgg

SEQ ID NO: 873 - DNA, 30 bp, Verticillium dahliae; identical to SEQ ID NO: 423
  source 1..30: mol_type = other DNA

SEQ ID NO: 874 - DNA, 30 bp, Fusarium oxysporum; identical to SEQ ID NO: 813
  source 1..30: mol_type = other DNA; note = f. sp. narcissi

SEQ ID NO: 875 - DNA, 30 bp, Fusarium oxysporum; identical to SEQ ID NO: 420
  source 1..30: mol_type = other DNA; note = f. sp. narcissi

SEQ ID NO: 876 - DNA, 30 bp, Fusarium oxysporum; identical to SEQ ID NO: 443
  source 1..30: mol_type = other DNA; note = f. sp. narcissi

SEQ ID NO: 877 - DNA, 30 bp, Pochonia chlamydosporia
  source 1..30: mol_type = other DNA; strain = 123
tggtgctggaggccaggccagccttgctgg

SEQ ID NO: 878 - DNA, 30 bp, Pochonia chlamydosporia
  source 1..30: mol_type = other DNA; strain = 123
tggtgctggaggccaggccagtcatgctgg

SEQ ID NO: 879 - DNA, 30 bp, Fusarium fujikuroi; identical to SEQ ID NO: 357
  source 1..30: mol_type = other DNA

SEQ ID NO: 880 - DNA, 30 bp, Fusarium fujikuroi; identical to SEQ ID NO: 358
  source 1..30: mol_type = other DNA

SEQ ID NO: 881 - DNA, 30 bp, Fusarium fujikuroi; identical to SEQ ID NO: 358
  source 1..30: mol_type = other DNA

SEQ ID NO: 882 - DNA, 30 bp, Fusarium fujikuroi; identical to SEQ ID NO: 787
  source 1..30: mol_type = other DNA

SEQ ID NO: 883 - DNA, 30 bp, Fusarium fujikuroi; identical to SEQ ID NO: 592
  source 1..30: mol_type = other DNA

SEQ ID NO: 884 - DNA, 30 bp, Fusarium fujikuroi; identical to SEQ ID NO: 376
  source 1..30: mol_type = other DNA

SEQ ID NO: 885 - DNA, 30 bp, Fusarium fujikuroi; identical to SEQ ID NO: 786
  source 1..30: mol_type = other DNA

SEQ ID NO: 886 - DNA, 30 bp, Fusarium fujikuroi; identical to SEQ ID NO: 787
  source 1..30: mol_type = other DNA

SEQ ID NO: 887 - DNA, 30 bp, Fusarium fujikuroi; identical to SEQ ID NO: 592
  source 1..30: mol_type = other DNA

SEQ ID NO: 888 - DNA, 30 bp, Fusarium fujikuroi; identical to SEQ ID NO: 378
  source 1..30: mol_type = other DNA

SEQ ID NO: 889 - DNA, 30 bp, Fusarium fujikuroi; identical to SEQ ID NO: 358
  source 1..30: mol_type = other DNA

SEQ ID NO: 890 - DNA, 30 bp, Fusarium fujikuroi; identical to SEQ ID NO: 461
  source 1..30: mol_type = other DNA

SEQ ID NO: 891 - DNA, 30 bp, Fusarium oxysporum
  source 1..30: mol_type = other DNA
tggtgcacatggcgaggtcagccttgctgg

SEQ ID NO: 892 - DNA, 30 bp, Fusarium oxysporum; identical to SEQ ID NO: 421
  source 1..30: mol_type = other DNA

SEQ ID NO: 893 - DNA, 30 bp, Fusarium oxysporum; identical to SEQ ID NO: 453
  source 1..30: mol_type = other DNA

SEQ ID NO: 894 - DNA, 39 bp, Lachancea sp.
  source 1..39: mol_type = other DNA; note = CBS 6924
tggagatggttgagactagacagaggacagcctatgtac

SEQ ID NO: 895 - DNA, 33 bp, Lachancea sp.
  source 1..33: mol_type = other DNA; note = CBS 6924
tggttgagattagacagaggtcagccaatgtac

SEQ ID NO: 896 - DNA, 39 bp, Lachancea meyersii
  source 1..39: mol_type = other DNA; strain = CBS 8951
tggcactggttgagattggacagaggacagccaatgtac

SEQ ID NO: 897 - DNA, 39 bp, Lachancea meyersii
  source 1..39: mol_type = other DNA; strain = CBS 8951
tggcattggttgaaactcgacagaggccaaccaatgtac

SEQ ID NO: 898 - DNA, 33 bp, Lachancea meyersii
  source 1..33: mol_type = other DNA; strain = CBS 8951
tggcattggttgaaactcgacagaggccaacca

SEQ ID NO: 899 - DNA, 33 bp, Lachancea meyersii
  source 1..33: mol_type = other DNA; strain = CBS 8951
tggcattggttgagacttgacaggggacaacca

SEQ ID NO: 900 - DNA, 39 bp, Lachancea dasiensis
  source 1..39: mol_type = other DNA; strain = CBS 10888
tggaagtggctacgtttgggtcgcggccagccaatgtac

SEQ ID NO: 901 - DNA, 33 bp, Lachancea dasiensis
  source 1..33: mol_type = other DNA; strain = CBS 10888
tggaagtggctacgtttgggtcgcggccagcca

SEQ ID NO: 902 - DNA, 39 bp, Lachancea dasiensis
  source 1..39: mol_type = other DNA; strain = CBS 10888
tggagctggttacgtcttgggagaggacagcccatgtat

SEQ ID NO: 903 - DNA, 33 bp, Lachancea dasiensis
  source 1..33: mol_type = other DNA; strain = CBS 10888
tggagctggttacgtcttgggagaggacagccc

SEQ ID NO: 904 - DNA, 39 bp, Lachancea dasiensis
  source 1..39: mol_type = other DNA; strain = CBS 10888
tggaggtggctacgcctaggacgcggccagcctatgtat

SEQ ID NO: 905 - DNA, 33 bp, Lachancea dasiensis
  source 1..33: mol_type = other DNA; strain = CBS 10888
tggaggtggctacgcctaggacgcggccagcct

SEQ ID NO: 906 - DNA, 39 bp, Lachancea dasiensis
  source 1..39: mol_type = other DNA; strain = CBS 10888
tggcagtggctccgtcttggccgtggccagcccatgtac

SEQ ID NO: 907 - DNA, 33 bp, Lachancea dasiensis
  source 1..33: mol_type = other DNA; strain = CBS 10888
tggcagtggctccgtcttggccgtggccagccc

SEQ ID NO: 908 - DNA, 39 bp, Lachancea dasiensis
  source 1..39: mol_type = other DNA; strain = CBS 10888
tggcgttggttgcggctcgacaggggccagcccatgtac

SEQ ID NO: 909 - DNA, 33 bp, Lachancea dasiensis
  source 1..33: mol_type = other DNA; strain = CBS 10888
tggcgttggttgcggctcgacaggggccagccc

SEQ ID NO: 910 - DNA, 33 bp, Lachancea dasiensis
  source 1..33: mol_type = other DNA; strain = CBS 10888
tggctacgcctaggacgcggccagcctatgtat

SEQ ID NO: 911 - DNA, 33 bp, Lachancea dasiensis
  source 1..33: mol_type = other DNA; strain = CBS 10888
tggttgcggctcgacaggggccagcccatgtac

SEQ ID NO: 912 - DNA, 39 bp, Lachancea nothofagi
  source 1..39: mol_type = other DNA; strain = CBS 11611
tggacatggttgaagctcgacaggggtcagccaatgtat

SEQ ID NO: 913 - DNA, 33 bp, Lachancea nothofagi
  source 1..33: mol_type = other DNA; strain = CBS 11611
tggacatggttgaagctcgacaggggtcagcca

SEQ ID NO: 914 - DNA, 33 bp, Lachancea nothofagi
  source 1..33: mol_type = other DNA; strain = CBS 11611
tggagatggttgaggctcgacagaggccagcca

SEQ ID NO: 915 - DNA, 39 bp, Lachancea nothofagi
  source 1..39: mol_type = other DNA; strain = CBS 11611
tggagatggttgaggctcgacagaggccagcctatgtac

SEQ ID NO: 916 - DNA, 39 bp, Lachancea nothofagi
  source 1..39: mol_type = other DNA; strain = CBS 11611
tggagctggctaagactcgataggggccagccaatgtat

SEQ ID NO: 917 - DNA, 33 bp, Lachancea nothofagi
  source 1..33: mol_type = other DNA; strain = CBS 11611
tggagctggctaagactcgataggggccagcca

SEQ ID NO: 918 - DNA, 33 bp, Lachancea nothofagi
  source 1..33: mol_type = other DNA; strain = CBS 11611
tggttgaagctcgacaggggtcagccaatgtat

SEQ ID NO: 919 - DNA, 33 bp, Lachancea nothofagi
  source 1..33: mol_type = other DNA; strain = CBS 11611
tggttgaggctcgacagaggccagcctatgtac

SEQ ID NO: 920 - DNA, 30 bp, Fusarium fujikuroi; identical to SEQ ID NO: 786
  source 1..30: mol_type = other DNA

SEQ ID NO: 921 - DNA, 30 bp, Fusarium fujikuroi; identical to SEQ ID NO: 787
  source 1..30: mol_type = other DNA

SEQ ID NO: 922 - DNA, 30 bp, Fusarium fujikuroi; identical to SEQ ID NO: 358
  source 1..30: mol_type = other DNA

SEQ ID NO: 923 - DNA, 30 bp, Fusarium fujikuroi
  source 1..30: mol_type = other DNA
tggtgtacctggaggggccaaccctgttgg

SEQ ID NO: 924 - DNA, 39 bp, Lachancea fermentati
  source 1..39: mol_type = other DNA
tggcactggctgcgccttggcaagggccagccgctatac

SEQ ID NO: 925 - DNA, 39 bp, Lachancea fermentati
  source 1..39: mol_type = other DNA
tggcactggctgcggctcagcagcggccagccactctac

SEQ ID NO: 926 - DNA, 39 bp, Kazachstania saulgeensis
  source 1..39: mol_type = other DNA
tggcactggttggaactagactggggtcaaccattatac

SEQ ID NO: 927 - DNA, 39 bp, Kazachstania saulgeensis
  source 1..39: mol_type = other DNA
tggcattggttggaattagactggggtcaaccattatac

SEQ ID NO: 928 - DNA, 39 bp, Saccharomycodes ludwigii
  source 1..39: mol_type = other DNA
tggcaatggttaagtttccagtggggggagccaatgtac

SEQ ID NO: 929 - DNA, 39 bp, Saccharomycodes ludwigii
  source 1..39: mol_type = other DNA
tggcaatggttgactttccaatggggggaaccaatgtat

SEQ ID NO: 930 - DNA, 30 bp, Chlorociboria aeruginascens
  source 1..30: mol_type = other DNA
aagtgtggtcgacccggtcaaggttgcaag

SEQ ID NO: 931 - DNA, 27 bp, Botryotinia calthae
  source 1..27: mol_type = other DNA
tggtgcggacgtcccggacaaccttgc

SEQ ID NO: 932 - DNA, 30 bp, Botryotinia calthae
  source 1..30: mol_type = other DNA
tggtgtggacgtcccgggcaaccatgcaag

SEQ ID NO: 933 - DNA, 30 bp, Botrytis tulipae
  source 1..30: mol_type = other DNA
tggtgtggacgcccaggacaaccatgcaag

SEQ ID NO: 934 - DNA, 27 bp, Botrytis tulipae
  source 1..27: mol_type = other DNA
tggtgtggacgtcccggacaaccttgc

SEQ ID NO: 935 - DNA, 30 bp, Botrytis paeoniae
  source 1..30: mol_type = other DNA
tggtgcggaagacccggtcaaccatgtaag

SEQ ID NO: 936 - DNA, 27 bp, Botrytis paeoniae
  source 1..27: mol_type = other DNA
tggtgcggacgtcccggacaaccttgc

SEQ ID NO: 937 - DNA, 27 bp, Botrytis hyacinthi
  source 1..27: mol_type = other DNA
tggtgcggacgcccaggacaaccttgc

SEQ ID NO: 938 - DNA, 30 bp, Botrytis hyacinthi
  source 1..30: mol_type = other DNA
tggtgcggacgtcccggacaaccatgcaaa

SEQ ID NO: 939 - DNA, 30 bp, Botryotinia convoluta
  source 1..30: mol_type = other DNA
tggtgcggacgccccggtcaaccatgcaag

SEQ ID NO: 940 - DNA, 27 bp, Botryotinia convoluta
  source 1..27: mol_type = other DNA
tggtgtggacgcccaggacaaccctgc

SEQ ID NO: 941 - DNA, 30 bp, Botryotinia narcissicola
  source 1..30: mol_type = other DNA
tggtgcggacgccccggtcaaccatgtaaa

SEQ ID NO: 942 - DNA, 27 bp, Botryotinia narcissicola
  source 1..27: mol_type = other DNA
tggtgcggacgtcctggacaaccttgc

SEQ ID NO: 943 - DNA, 30 bp, Botrytis elliptica
  source 1..30: mol_type = other DNA
tggtgcggaagacccggacaaccatgcaag

SEQ ID NO: 944 - DNA, 27 bp, Botrytis elliptica
  source 1..27: mol_type = other DNA
tggtgcggacgtcccggacaaccttgc

SEQ ID NO: 945 - DNA, 30 bp, Botrytis porri; identical to SEQ ID NO: 943
  source 1..30: mol_type = other DNA

SEQ ID NO: 946 - DNA, 27 bp, Botrytis porri
  source 1..27: mol_type = other DNA
tggtgcggacgcccaggacaaccttgc

SEQ ID NO: 947 - DNA, 27 bp, Botrytis galanthina
  source 1..27: mol_type = other DNA
tggtgcggacgtccaggacaaccttgc

SEQ ID NO: 948 - DNA, 30 bp, Botrytis galanthina; identical to SEQ ID NO: 441
  source 1..30: mol_type = other DNA

SEQ ID NO: 949 - DNA, 30 bp, Pyricularia grisea
  source 1..30: mol_type = other DNA
tggtgcccacgccggggccagccgtgctgg

SEQ ID NO: 950 - DNA, 30 bp, Pyricularia sp.
  source 1..30: mol_type = other DNA; note = CBS 133598
tggtgcccgcgccgtggccaaccctgctgg

SEQ ID NO: 951 - DNA, 30 bp, Pyricularia pennisetigena; identical to SEQ ID NO: 437
  source 1..30: mol_type = other DNA

SEQ ID NO: 952 - DNA, 30 bp, Fusarium oxysporum; identical to SEQ ID NO: 421
  source 1..30: mol_type = other DNA; note = f. sp. cubense

SEQ ID NO: 953 - DNA, 30 bp, Fusarium oxysporum; identical to SEQ ID NO: 422
  source 1..30: mol_type = other DNA; note = f. sp. cubense

SEQ ID NO: 954 - DNA, 30 bp, Fusarium oxysporum; identical to SEQ ID NO: 453
  source 1..30: mol_type = other DNA; note = f. sp. cubense

SEQ ID NO: 955 - DNA, 30 bp, Metarhizium rileyi
  source 1..30: mol_type = other DNA
tggtgctggcgaccaggacagccttgctgg

SEQ ID NO: 956 - DNA, 30 bp, Fusarium oxysporum; identical to SEQ ID NO: 420
  source 1..30: mol_type = other DNA; note = f. sp. cubense

SEQ ID NO: 957 - DNA, 30 bp, Fusarium oxysporum; identical to SEQ ID NO: 421
  source 1..30: mol_type = other DNA; note = f. sp. cubense

SEQ ID NO: 958 - DNA, 30 bp, Fusarium oxysporum; identical to SEQ ID NO: 422
  source 1..30: mol_type = other DNA; note = f. sp. cubense

SEQ ID NO: 959 - DNA, 30 bp, Fusarium graminearum
  source 1..30: mol_type = other DNA
tggtgcacctggaaggggcagccctgttgg

SEQ ID NO: 960 - DNA, 30 bp, Fusarium graminearum; identical to SEQ ID NO: 844
  source 1..30: mol_type = other DNA

SEQ ID NO: 961 - protein, 9 aa, Eremothecium cymbalariae
  REGION 1..9: note = Amino acid sequence of SEQ ID NO:1
WHWLRFDRG

SEQ ID NO: 962 - protein, 12 aa, Eremothecium cymbalariae
  REGION 1..12: note = Amino acid sequence of SEQ ID NO:2
WHWLRFDRGQPI

SEQ ID NO: 963 - protein, 12 aa, Eremothecium cymbalariae
  REGION 1..12: note = Amino acid sequence of SEQ ID NO:3
WHWLRFSKGEPL

SEQ ID NO: 964 - protein, 11 aa, Eremothecium cymbalariae
  REGION 1..11: note = Amino acid sequence of SEQ ID NO:4
WHWLRFSKGEP

SEQ ID NO: 965 - protein, 13 aa, Eremothecium cymbalariae
  REGION 1..13: note = Amino acid sequence of SEQ ID NO:5
WHWLRFNRGEPMY

SEQ ID NO: 966 - protein, 11 aa, Eremothecium cymbalariae
  REGION 1..11: note = Amino acid sequence of SEQ ID NO:6
WHWLRFNRGEP

SEQ ID NO: 967 - protein, 13 aa, Saccharomyces cerevisiae
  REGION 1..13: note = Amino acid sequence of SEQ ID NO:7
WHWLQLKPGQPMY

SEQ ID NO: 968 - protein, 13 aa, Saccharomyces cerevisiae
  REGION 1..13: note = Amino acid sequence of SEQ ID NO:8
WHWLNLRPGQPMY

SEQ ID NO: 969 - protein, 13 aa, Saccharomyces cerevisiae
  REGION 1..13: note = Amino acid sequence of SEQ ID NO:9
WHWLQLKPGQPMY

SEQ ID NO: 970 - protein, 13 aa, Saccharomyces cerevisiae
  REGION 1..13: note = Amino acid sequence of SEQ ID NO:10
WHWLNLRPGQPMY

SEQ ID NO: 971 - protein, 13 aa, Saccharomyces cerevisiae
  REGION 1..13: note = Amino acid sequence of SEQ ID NO:11
WHWLQLKPGQPMY

SEQ ID NO: 972 - protein, 13 aa, Saccharomyces cerevisiae
  REGION 1..13: note = Amino acid sequence of SEQ ID NO:12
WHWLQLKPGQPMY

SEQ ID NO: 973 - protein, 13 aa, Saccharomyces cerevisiae
  REGION 1..13: note = Amino acid sequence of SEQ ID NO:13
WHWLNLRPGQPMY

SEQ ID NO: 974 - protein, 13 aa, Saccharomyces cerevisiae
  REGION 1..13: note = Amino acid sequence of SEQ ID NO:14
WHWLQLKPGQPMY

SEQ ID NO: 975 - protein, 13 aa, Saccharomyces cerevisiae
  REGION 1..13: note = Amino acid sequence of SEQ ID NO:15
WHWLNLRPGQPMY

SEQ ID NO: 976 - protein, 13 aa, Saccharomyces cerevisiae
  REGION 1..13: note = Amino acid sequence of SEQ ID NO:16
WHWLQLKPGQPMY

SEQ ID NO: 977 - protein, 13 aa, Saccharomyces cerevisiae
  REGION 1..13: note = Amino acid sequence of SEQ ID NO:17
WHWLNLRPGQPMY

SEQ ID NO: 978 - protein, 13 aa, Saccharomyces cerevisiae
  REGION 1..13: note = Amino acid sequence of SEQ ID NO:18
WHWLQLKPGQPMY

SEQ ID NO: 979 - protein, 13 aa, Saccharomyces cerevisiae
  REGION 1..13: note = Amino acid sequence of SEQ ID NO:19
WHWLNLRPGQPMY

SEQ ID NO: 980 - protein, 13 aa, Saccharomyces cerevisiae
  REGION 1..13: note = Amino acid sequence of SEQ ID NO:20
WHWLQLKPGQPMY

SEQ ID NO: 981 - protein, 13 aa, Saccharomyces cerevisiae
  REGION 1..13: note = Amino acid sequence of SEQ ID NO:21
WHWLNLRPGQPMY

SEQ ID NO: 982 - protein, 13 aa, Saccharomyces cerevisiae
  REGION 1..13: note = Amino acid sequence of SEQ ID NO:22
WHWLQLKPGQPMY

SEQ ID NO: 983 - protein, 13 aa, Saccharomyces cerevisiae
  REGION 1..13: note = Amino acid sequence of SEQ ID NO:23
WHWLNLRPGQPMY

SEQ ID NO: 984 - protein, 13 aa, Saccharomyces cerevisiae
  REGION 1..13: note = Amino acid sequence of SEQ ID NO:24
WHWLQLKPGQPMY

SEQ ID NO: 985 - protein, 13 aa, Saccharomyces cerevisiae
  REGION 1..13: note = Amino acid sequence of SEQ ID NO:25
WHWLNLRPGQPMY

SEQ ID NO: 986 - protein, 13 aa, Saccharomyces cerevisiae
  REGION 1..13: note = Amino acid sequence of SEQ ID NO:26
WHWLQLKPGQPMY

SEQ ID NO: 987 - protein, 13 aa, Saccharomyces cerevisiae
  REGION 1..13: note = Amino acid sequence of SEQ ID NO:27
WHWLNLRPGQPMY

SEQ ID NO: 988 - protein, 13 aa, Saccharomyces cerevisiae
  REGION 1..13: note = Amino acid sequence of SEQ ID NO:28
WHWLQLKPGQPMY

SEQ ID NO: 989 - protein, 13 aa, Saccharomyces cerevisiae
  REGION 1..13: note = Amino acid sequence of SEQ ID NO:29
WHWLNLRPGQPMY

SEQ ID NO: 990 - protein, 13 aa, Saccharomyces cerevisiae
  REGION 1..13: note = Amino acid sequence of SEQ ID NO:30
WHWLQLKPGQPMY

SEQ ID NO: 991 - protein, 13 aa, Saccharomyces cerevisiae
  REGION 1..13: note = Amino acid sequence of SEQ ID NO:31
WHWLNLRPGQPMY

SEQ ID NO: 992 - protein, 13 aa, Saccharomyces cerevisiae
  REGION 1..13: note = Amino acid sequence of SEQ ID NO:32
WHWLQLKPGQPMY

SEQ ID NO: 993 - protein, 13 aa, Saccharomyces cerevisiae
  REGION 1..13: note = Amino acid sequence of SEQ ID NO:33
WHWLNLRPGQPMY

SEQ ID NO: 994 - protein, 13 aa, Saccharomyces cerevisiae
  REGION 1..13: note = Amino acid sequence of SEQ ID NO:34
WHWLQLKPGQPMY

SEQ ID NO: 995 - protein, 13 aa, Saccharomyces cerevisiae
  REGION 1..13: note = Amino acid sequence of SEQ ID NO:35
WHWLNLRPGQPMY

SEQ ID NO: 996 - protein, 13 aa, Saccharomyces cerevisiae
  REGION 1..13: note = Amino acid sequence of SEQ ID NO:36
WHWLQLKPGQPMY

SEQ ID NO: 997 - protein, 13 aa, Saccharomyces cerevisiae
  REGION 1..13: note = Amino acid sequence of SEQ ID NO:37
WHWLNLRPGQPMY

SEQ ID NO: 998 - protein, 13 aa, Saccharomyces cerevisiae
  REGION 1..13: note = Amino acid sequence of SEQ ID NO:38
WHWLQLKPGQPMY

SEQ ID NO: 999 - protein, 13 aa, Saccharomyces cerevisiae
  REGION 1..13: note = Amino acid sequence of SEQ ID NO:39
WHWLNLRPGQPMY

SEQ ID NO: 1000 - protein, 13 aa, Saccharomyces cerevisiae
  REGION 1..13: note = Amino acid sequence of SEQ ID NO:40
WHWLQLKPGQPMY

SEQ ID NO: 1001 - protein, 13 aa, Saccharomyces cerevisiae
  REGION 1..13: note = Amino acid sequence of SEQ ID NO:41
WHWLNLRPGQPMY

SEQ ID NO: 1002 - protein, 13 aa, Saccharomyces cerevisiae
  REGION 1..13: note = Amino acid sequence of SEQ ID NO:42
WHWLQLKPGQPMY

SEQ ID NO: 1003 - protein, 13 aa, Saccharomyces cerevisiae
  REGION 1..13: note = Amino acid sequence of SEQ ID NO:43
WHWLNLRPGQPMY

SEQ ID NO: 1004 - protein, 13 aa, Saccharomyces cerevisiae
  REGION 1..13: note = Amino acid sequence of SEQ ID NO:44
WHWLQLKPGQPMY

SEQ ID NO: 1005 - protein, 13 aa, Saccharomyces cerevisiae
  REGION 1..13: note = Amino acid sequence of SEQ ID NO:45
WHWLNLRPGQPMY

SEQ ID NO: 1006 - protein, 13 aa, Saccharomyces cerevisiae
  REGION 1..13: note = Amino acid sequence of SEQ ID NO:46
WHWLQLKPGQPMY

SEQ ID NO: 1007 - protein, 13 aa, Saccharomyces cerevisiae
  REGION 1..13: note = Amino acid sequence of SEQ ID NO:47
WHWLNLRPGQPMY

SEQ ID NO: 1008 - protein, 13 aa, Saccharomyces cerevisiae
  REGION 1..13: note = Amino acid sequence of SEQ ID NO:48
WHWLQLKPGQPMY

SEQ ID NO: 1009 - protein, 13 aa, Saccharomyces cerevisiae
  REGION 1..13: note = Amino acid sequence of SEQ ID NO:49
WHWLNLRPGQPMY

SEQ ID NO: 1010 - protein, 13 aa, Saccharomyces cerevisiae
  REGION 1..13: note = Amino acid sequence of SEQ ID NO:50
WHWLQLKPGQPMY

SEQ ID NO: 1011 - protein, 13 aa, Saccharomyces cerevisiae
  REGION 1..13: note = Amino acid sequence of SEQ ID NO:51
WHWLNLRPGQPMY

SEQ ID NO: 1012 - protein, 13 aa, Saccharomyces cerevisiae
  REGION 1..13: note = Amino acid sequence of SEQ ID NO:52
WHWLQLKPGQPMY

SEQ ID NO: 1013 - protein, 13 aa, Saccharomyces cerevisiae
  REGION 1..13: note = Amino acid sequence of SEQ ID NO:53
WHWLNLRPGQPMY

SEQ ID NO: 1014 - protein, 13 aa, Saccharomyces cerevisiae
  REGION 1..13: note = Amino acid sequence of SEQ ID NO:54
WHWLQLKPGQPMY

SEQ ID NO: 1015 - protein, 13 aa, Saccharomyces cerevisiae
  REGION 1..13: note = Amino acid sequence of SEQ ID NO:55
WHWLNLRPGQPMY

SEQ ID NO: 1016 - protein, 13 aa, Saccharomyces cerevisiae
  REGION 1..13: note = Amino acid sequence of SEQ ID NO:56
WHWLQLKPGQPMY

SEQ ID NO: 1017 - protein, 13 aa, Saccharomyces cerevisiae
  REGION 1..13: note = Amino acid sequence of SEQ ID NO:57
WHWLNLRPGQPMY

SEQ ID NO: 1018 - protein, 13 aa, Saccharomyces cerevisiae
  REGION 1..13: note = Amino acid sequence of SEQ ID NO:58
WHWLQLKPGQPMY

SEQ ID NO: 1019 - protein, 13 aa, Saccharomyces cerevisiae
  REGION 1..13: note = Amino acid sequence of SEQ ID NO:59
WHWLNLRPGQPMY

SEQ ID NO: 1020 - protein, 13 aa, Saccharomyces cerevisiae
  REGION 1..13: note = Amino acid sequence of SEQ ID NO:60
WHWLQLKPGQPMY

SEQ ID NO: 1021 - protein, 13 aa, Saccharomyces cerevisiae
  REGION 1..13: note = Amino acid sequence of SEQ ID NO:61
WHWLNLRPGQPMY

SEQ ID NO: 1022 - protein, 13 aa, Saccharomyces cerevisiae
  REGION 1..13: note = Amino acid sequence of SEQ ID NO:62
WHWLQLKPGQPMY

SEQ ID NO: 1023 - protein, 13 aa, Saccharomyces cerevisiae
  REGION 1..13: note = Amino acid sequence of SEQ ID NO:63
WHWLNLRPGQPMY

SEQ ID NO: 1024 - protein, 13 aa, Saccharomyces cerevisiae
  REGION 1..13: note = Amino acid sequence of SEQ ID NO:64
WHWLQLKPGQPMY

SEQ ID NO: 1025 - protein, 13 aa, Saccharomyces cerevisiae
  REGION 1..13: note = Amino acid sequence of SEQ ID NO:65
WHWLNLRPGQPMY

SEQ ID NO: 1026 - protein, 13 aa, Saccharomyces cerevisiae
  REGION 1..13: note = Amino acid sequence of SEQ ID NO:66
WHWLQLKPGQPMY

SEQ ID NO: 1027 - protein, 13 aa, Saccharomyces cerevisiae
  REGION 1..13: note = Amino acid sequence of SEQ ID NO:67
WHWLNLRPGQPMY

SEQ ID NO: 1028 - protein, 13 aa, Saccharomyces cerevisiae
  REGION 1..13: note = Amino acid sequence of SEQ ID NO:68
WHWLQLKPGQPMY

SEQ ID NO: 1029 - protein, 13 aa, Saccharomyces cerevisiae
  REGION 1..13: note = Amino acid sequence of SEQ ID NO:69
WHWLNLRPGQPMY

SEQ ID NO: 1030 - protein, 13 aa, Saccharomyces cerevisiae
  REGION 1..13: note = Amino acid sequence of SEQ ID NO:70
WHWLQLKPGQPMY

SEQ ID NO: 1031 - protein, 13 aa, Saccharomyces cerevisiae
  REGION 1..13: note = Amino acid sequence of SEQ ID NO:71
WHWLNLRPGQPMY

SEQ ID NO: 1032 - protein, 13 aa, Saccharomyces cerevisiae
  REGION 1..13: note = Amino acid sequence of SEQ ID NO:72
WHWLQLKPGQPMY

SEQ ID NO: 1033 - protein, 13 aa, Saccharomyces cerevisiae
  REGION 1..13: note = Amino acid sequence of SEQ ID NO:73
WHWLNLRPGQPMY

SEQ ID NO: 1034 - protein, 13 aa, Saccharomyces cerevisiae
  REGION 1..13: note = Amino acid sequence of SEQ ID NO:74
WHWLQLKPGQPMY

SEQ ID NO: 1035 - protein, 13 aa, Saccharomyces cerevisiae
  REGION 1..13: note = Amino acid sequence of SEQ ID NO:75
WHWLNLRPGQPMY

SEQ ID NO: 1036 - protein, 13 aa, Saccharomyces cerevisiae
  REGION 1..13: note = Amino acid sequence of SEQ ID NO:76
WHWLQLKPGQPMY

SEQ ID NO: 1037 - protein, 13 aa, Saccharomyces cerevisiae
  REGION 1..13: note = Amino acid sequence of SEQ ID NO:77
WHWLNLRPGQPMY

SEQ ID NO: 1038 - protein, 13 aa, Saccharomyces cerevisiae
  REGION 1..13: note = Amino acid sequence of SEQ ID NO:78
WHWLQLKPGQPMY

SEQ ID NO: 1039 - protein, 13 aa, Saccharomyces cerevisiae
  REGION 1..13: note = Amino acid sequence of SEQ ID NO:79
WHWLNLRPGQPMY

SEQ ID NO: 1040 - protein, 13 aa, Saccharomyces cerevisiae
  REGION 1..13: note = Amino acid sequence of SEQ ID NO:80
WHWLQLKPGQPMY

SEQ ID NO: 1041 - protein, 13 aa, Saccharomyces cerevisiae
  REGION 1..13: note = Amino acid sequence of SEQ ID NO:81
WHWLNLRPGQPMY

SEQ ID NO: 1042 - protein, 13 aa, Saccharomyces cerevisiae
  REGION 1..13: note = Amino acid sequence of SEQ ID NO:82
WHWLQLKPGQPMY

SEQ ID NO: 1043 - protein, 13 aa, Saccharomyces cerevisiae
  REGION 1..13: note = Amino acid sequence of SEQ ID NO:83
WHWLNLRPGQPMY

SEQ ID NO: 1044 - protein, 13 aa, Saccharomyces cerevisiae
  REGION 1..13: note = Amino acid sequence of SEQ ID NO:84
WHWLQLKPGQPMY

SEQ ID NO: 1045 - protein, 13 aa, Saccharomyces cerevisiae
  REGION 1..13: note = Amino acid sequence of SEQ ID NO:85
WHWLNLRPGQPMY

SEQ ID NO: 1046 - protein, 13 aa, Saccharomyces cerevisiae
  REGION 1..13: note = Amino acid sequence of SEQ ID NO:86
WHWLQLKPGQPMY

SEQ ID NO: 1047 - protein, 13 aa, Saccharomyces cerevisiae
  REGION 1..13: note = Amino acid sequence of SEQ ID NO:87
WHWLNLRPGQPMY

SEQ ID NO: 1048 - protein, 13 aa, Saccharomyces cerevisiae
  REGION 1..13: note = Amino acid sequence of SEQ ID NO:88
WHWLQLKPGQPMY

SEQ ID NO: 1049 - protein, 13 aa, Saccharomyces cerevisiae
  REGION 1..13: note = Amino acid sequence of SEQ ID NO:89
WHWLNLRPGQPMY

SEQ ID NO: 1050 - protein, 13 aa, Saccharomyces cerevisiae
  REGION 1..13: note = Amino acid sequence of SEQ ID NO:90
WHWLQLKPGQPMY

SEQ ID NO: 1051 - protein, 13 aa, Saccharomyces cerevisiae
  REGION 1..13: note = Amino acid sequence of SEQ ID NO:91
WHWLNLRPGQPMY

SEQ ID NO: 1052 - protein, 13 aa, Saccharomyces cerevisiae
  REGION 1..13: note = Amino acid sequence of SEQ ID NO:92
WHWLQLKPGQPMY

SEQ ID NO: 1053 - protein, 13 aa, Saccharomyces cerevisiae
  REGION 1..13: note = Amino acid sequence of SEQ ID NO:93
WHWLNLRPGQPMY

SEQ ID NO: 1054 - protein, 13 aa, Saccharomyces cerevisiae
  REGION 1..13: note = Amino acid sequence of SEQ ID NO:94
WHWLQLKPGQPMY

SEQ ID NO: 1055 - protein, 13 aa, Saccharomyces cerevisiae
  REGION 1..13: note = Amino acid sequence of SEQ ID NO:95
WHWLNLRPGQPMY

SEQ ID NO: 1056 - protein, 13 aa, Saccharomyces cerevisiae
  REGION 1..13: note = Amino acid sequence of SEQ ID NO:96
WHWLQLKPGQPMY

SEQ ID NO: 1057 - protein, 13 aa, Saccharomyces cerevisiae
  REGION 1..13: note = Amino acid sequence of SEQ ID NO:97
WHWLNLRPGQPMY

SEQ ID NO: 1058 - protein, 13 aa, Saccharomyces cerevisiae
  REGION 1..13: note = Amino acid sequence of SEQ ID NO:98
WHWLQLKPGQPMY

SEQ ID NO: 1059 - protein, 13 aa, Saccharomyces cerevisiae
  REGION 1..13: note = Amino acid sequence of SEQ ID NO:99
WHWLNLRPGQPMY

SEQ ID NO: 1060 - protein, 13 aa, Saccharomyces cerevisiae
  REGION 1..13: note = Amino acid sequence of SEQ ID NO:100
WHWLQLKPGQPMY

SEQ ID NO: 1061 - protein, 13 aa, Saccharomyces cerevisiae
  REGION 1..13: note = Amino acid sequence of SEQ ID NO:101
WHWLNLRPGQPMY

SEQ ID NO: 1062 - protein, 13 aa, Saccharomyces cerevisiae
  REGION 1..13: note = Amino acid sequence of SEQ ID NO:102
WHWLQLKPGQPMY

SEQ ID NO: 1063 - protein, 13 aa, Saccharomyces cerevisiae
  REGION 1..13: note = Amino acid sequence of SEQ ID NO:103
WHWLNLRPGQPMY

SEQ ID NO: 1064 - protein, 13 aa, Saccharomyces cerevisiae
  REGION 1..13: note = Amino acid sequence of SEQ ID NO:104
WHWLQLKPGQPMY

SEQ ID NO: 1065 - protein, 13 aa, Saccharomyces cerevisiae
  REGION 1..13: note = Amino acid sequence of SEQ ID NO:105
WHWLNLRPGQPMY

SEQ ID NO: 1066 - protein, 13 aa, Saccharomyces cerevisiae
  REGION 1..13: note = Amino acid sequence of SEQ ID NO:106
WHWLQLKPGQPMY

SEQ ID NO: 1067 - protein, 13 aa, Saccharomyces cerevisiae
  REGION 1..13: note = Amino acid sequence of SEQ ID NO:107
WHWLNLRPGQPMY

SEQ ID NO: 1068 - protein, 13 aa, Saccharomyces cerevisiae
  REGION 1..13: note = Amino acid sequence of SEQ ID NO:108
WHWLQLKPGQPMY

SEQ ID NO: 1069 - protein, 13 aa, Saccharomyces cerevisiae
  REGION 1..13: note = Amino acid sequence of SEQ ID NO:109
WHWLNLRPGQPMY

SEQ ID NO: 1070 - protein, 13 aa, Saccharomyces cerevisiae
  REGION 1..13: note = Amino acid sequence of SEQ ID NO:110
WHWLQLKPGQPMY

SEQ ID NO: 1071 - protein, 13 aa, Saccharomyces cerevisiae
  REGION 1..13: note = Amino acid sequence of SEQ ID NO:111
WHWLNLRPGQPMY

SEQ ID NO: 1072 - protein, 13 aa, Saccharomyces cerevisiae
  REGION 1..13: note = Amino acid sequence of SEQ ID NO:112
WHWLQLKPGQPMY

SEQ ID NO: 1073 - protein, 13 aa, Saccharomyces cerevisiae
  REGION 1..13: note = Amino acid sequence of SEQ ID NO:113
WHWLNLRPGQPMY

SEQ ID NO: 1074 - protein, 13 aa, Saccharomyces cerevisiae
  REGION 1..13: note = Amino acid sequence of SEQ ID NO:114
WHWLQLKPGQPMY

SEQ ID NO: 1075 - protein, 13 aa, Saccharomyces cerevisiae
  REGION 1..13: note = Amino acid sequence of SEQ ID NO:115
WHWLNLRPGQPMY

SEQ ID NO: 1076 - protein, 13 aa, Saccharomyces cerevisiae
  REGION 1..13: note = Amino acid sequence of SEQ ID NO:116
WHWLQLKPGQPMY

SEQ ID NO: 1077 - protein, 13 aa, Saccharomyces cerevisiae
  REGION 1..13: note = Amino acid sequence of SEQ ID NO:117
WHWLNLRPGQPMY

SEQ ID NO: 1078 - protein, 13 aa, Saccharomyces cerevisiae
  REGION 1..13: note = Amino acid sequence of SEQ ID NO:118
WHWLQLKPGQPMY

SEQ ID NO: 1079 - protein, 13 aa, Saccharomyces cerevisiae
  REGION 1..13: note = Amino acid sequence of SEQ ID NO:119
WHWLNLRPGQPMY

SEQ ID NO: 1080 - protein, 13 aa, Saccharomyces cerevisiae
  REGION 1..13: note = Amino acid sequence of SEQ ID NO:120
WHWLQLKPGQPMY

SEQ ID NO: 1081 - protein, 13 aa, Saccharomyces cerevisiae
  REGION 1..13: note = Amino acid sequence of SEQ ID NO:121
WHWLNLRPGQPMY

SEQ ID NO: 1082 - protein, 13 aa, Saccharomyces cerevisiae
  REGION 1..13: note = Amino acid sequence of SEQ ID NO:122
WHWLQLKPGQPMY

SEQ ID NO: 1083 - protein, 13 aa, Saccharomyces cerevisiae
  REGION 1..13: note = Amino acid sequence of SEQ ID NO:123
WHWLNLRPGQPMY

SEQ ID NO: 1084 - protein, 13 aa, Saccharomyces cerevisiae
  REGION 1..13: note = Amino acid sequence of SEQ ID NO:124
WHWLQLKPGQPMY

SEQ ID NO: 1085 - protein, 13 aa, Saccharomyces cerevisiae
  REGION 1..13: note = Amino acid sequence of SEQ ID NO:125
WHWLNLRPGQPMY

SEQ ID NO: 1086 - protein, 13 aa, Saccharomyces cerevisiae
  REGION 1..13: note = Amino acid sequence of SEQ ID NO:126
WHWLQLKPGQPMY

SEQ ID NO: 1087 - protein, 13 aa, Saccharomyces cerevisiae
  REGION 1..13: note = Amino acid sequence of SEQ ID NO:127
WHWLNLRPGQPMY

SEQ ID NO: 1088 - protein, 13 aa, Saccharomyces cerevisiae
  REGION 1..13: note = Amino acid sequence of SEQ ID NO:128
WHWLQLKPGQPMY

SEQ ID NO: 1089 - protein, 13 aa, Saccharomyces cerevisiae
  REGION 1..13: note = Amino acid sequence of SEQ ID NO:129
WHWLNLRPGQPMY

SEQ ID NO: 1090 - protein, 13 aa, Saccharomyces cerevisiae
  REGION 1..13: note = Amino acid sequence of SEQ ID NO:130
WHWLQLKPGQPMY

SEQ ID NO: 1091 - protein, 13 aa, Saccharomyces cerevisiae
  REGION 1..13: note = Amino acid sequence of SEQ ID NO:131
WHWLNLRPGQPMY

SEQ ID NO: 1092 - protein, 13 aa, Saccharomyces cerevisiae
  REGION 1..13: note = Amino acid sequence of SEQ ID NO:132
WHWLQLKPGQPMY

SEQ ID NO: 1093 - protein, 13 aa, Saccharomyces cerevisiae
  REGION 1..13: note = Amino acid sequence of SEQ ID NO:133
WHWLNLRPGQPMY

SEQ ID NO: 1094 - protein, 13 aa, Saccharomyces cerevisiae
  REGION 1..13: note = Amino acid sequence of SEQ ID NO:134
WHWLQLKPGQPMY

SEQ ID NO: 1095 - protein, 13 aa, Saccharomyces cerevisiae
  REGION 1..13: note = Amino acid sequence of SEQ ID NO:135
WHWLNLRPGQPMY

SEQ ID NO: 1096 - protein, 13 aa, Saccharomyces cerevisiae
  REGION 1..13: note = Amino acid sequence of SEQ ID NO:136
WHWLQLKPGQPMY

SEQ ID NO: 1097 - protein, 13 aa, Saccharomyces cerevisiae
  REGION 1..13: note = Amino acid sequence of SEQ ID NO:137
WHWLNLRPGQPMY

SEQ ID NO: 1098 - protein, 13 aa, Saccharomyces cerevisiae
  REGION 1..13: note = Amino acid sequence of SEQ ID NO:138
WHWLQLKPGQPMY

SEQ ID NO: 1099 - protein, 13 aa, Saccharomyces cerevisiae
  REGION 1..13: note = Amino acid sequence of SEQ ID NO:139
WHWLNLRPGQPMY

SEQ ID NO: 1100 - protein, 13 aa, Saccharomyces cerevisiae
  REGION 1..13: note = Amino acid sequence of SEQ ID NO:140
WHWLQLKPGQPMY

SEQ ID NO: 1101 - protein, 13 aa, Saccharomyces cerevisiae
  REGION 1..13: note = Amino acid sequence of SEQ ID NO:141
WHWLNLRPGQPMY

SEQ ID NO: 1102 - protein, 13 aa, Saccharomyces cerevisiae
  REGION 1..13: note = Amino acid sequence of SEQ ID NO:142
WHWLQLKPGQPMY

SEQ ID NO: 1103 - protein, 13 aa, Saccharomyces cerevisiae
  REGION 1..13: note = Amino acid sequence of SEQ ID NO:143
WHWLNLRPGQPMY

SEQ ID NO: 1104 - protein, 13 aa, Saccharomyces cerevisiae
  REGION 1..13: note = Amino acid sequence of SEQ ID NO:144
WHWLQLKPGQPMY

SEQ ID NO: 1105 - protein, 13 aa, Saccharomyces cerevisiae
  REGION 1..13: note = Amino acid sequence of SEQ ID NO:145
WHWLNLRPGQPMY

SEQ ID NO: 1106 - protein, 13 aa, Saccharomyces cerevisiae
  REGION 1..13: note = Amino acid sequence of SEQ ID NO:146
WHWLQLKPGQPMY

SEQ ID NO: 1107 - protein, 13 aa, Saccharomyces cerevisiae
  REGION 1..13: note = Amino acid sequence of SEQ ID NO:147
WHWLNLRPGQPMY

SEQ ID NO: 1108 - protein, 13 aa, Saccharomyces cerevisiae
  REGION 1..13: note = Amino acid sequence of SEQ ID NO:148
WHWLQLKPGQPMY

SEQ ID NO: 1109 - protein, 13 aa, Saccharomyces cerevisiae
  REGION 1..13: note = Amino acid sequence of SEQ ID NO:149
WHWLNLRPGQPMY

SEQ ID NO: 1110 - protein, 13 aa, Saccharomyces cerevisiae
  REGION 1..13: note = Amino acid sequence of SEQ ID NO:150
WHWLQLKPGQPMY

SEQ ID NO: 1111 - protein, 13 aa, Saccharomyces cerevisiae
  REGION 1..13: note = Amino acid sequence of SEQ ID NO:151
WHWLNLRPGQPMY

SEQ ID NO: 1112 - protein, 13 aa, Saccharomyces cerevisiae
  REGION 1..13: note = Amino acid sequence of SEQ ID NO:152
WHWLQLKPGQPMY

SEQ ID NO: 1113 - protein, 13 aa, Saccharomyces cerevisiae
  REGION 1..13: note = Amino acid sequence of SEQ ID NO:153
WHWLNLRPGQPMY

SEQ ID NO: 1114 - protein, 13 aa, Saccharomyces cerevisiae
  REGION 1..13: note = Amino acid sequence of SEQ ID NO:154
WHWLQLKPGQPMY

SEQ ID NO: 1115 - protein, 13 aa, Saccharomyces cerevisiae
  REGION 1..13: note = Amino acid sequence of SEQ ID NO:155
WHWLNLRPGQPMY

SEQ ID NO: 1116 - protein, 13 aa, Saccharomyces cerevisiae
  REGION 1..13: note = Amino acid sequence of SEQ ID NO:156
WHWLQLKPGQPMY

SEQ ID NO: 1117 - protein, 13 aa, Saccharomyces cerevisiae
  REGION 1..13: note = Amino acid sequence of SEQ ID NO:157
WHWLNLRPGQPMY

SEQ ID NO: 1118 - protein, 13 aa, Saccharomyces cerevisiae
  REGION 1..13: note = Amino acid sequence of SEQ ID NO:158
WHWLQLKPGQPMY

SEQ ID NO: 1119 - protein, 13 aa, Saccharomyces cerevisiae
  REGION 1..13: note = Amino acid sequence of SEQ ID NO:159
WHWLNLRPGQPMY

SEQ ID NO: 1120 - protein, 13 aa, Saccharomyces cerevisiae
  REGION 1..13: note = Amino acid sequence of SEQ ID NO:160
WHWLQLKPGQPMY

SEQ ID NO: 1121 - protein, 13 aa, Saccharomyces cerevisiae
  REGION 1..13: note = Amino acid sequence of SEQ ID NO:161
WHWLNLRPGQPMY

SEQ ID NO: 1122 - protein, 13 aa, Saccharomyces cerevisiae
  REGION 1..13: note = Amino acid sequence of SEQ ID NO:162
WHWLQLKPGQPMY

SEQ ID NO: 1123 - protein, 13 aa, Saccharomyces cerevisiae
  REGION 1..13: note = Amino acid sequence of SEQ ID NO:163
WHWLNLRPGQPMY

SEQ ID NO: 1124 - protein, 13 aa, Saccharomyces cerevisiae
  REGION 1..13: note = Amino acid sequence of SEQ ID NO:164
WHWLQLKPGQPMY

SEQ ID NO: 1125 - protein, 13 aa, Saccharomyces cerevisiae
  REGION 1..13: note = Amino acid sequence of SEQ ID NO:165
WHWLNLRPGQPMY

SEQ ID NO: 1126 - protein, 13 aa, Saccharomyces cerevisiae
  REGION 1..13: note = Amino acid sequence of SEQ ID NO:166
WHWLQLKPGQPMY

SEQ ID NO: 1127 - protein, 13 aa, Saccharomyces cerevisiae
  REGION 1..13: note = Amino acid sequence of SEQ ID NO:167
WHWLNLRPGQPMY

SEQ ID NO: 1128 - protein, 13 aa, Saccharomyces cerevisiae
  REGION 1..13: note = Amino acid sequence of SEQ ID NO:168
WHWLQLKPGQPMY

SEQ ID NO: 1129 - protein, 13 aa, Saccharomyces cerevisiae
  REGION 1..13: note = Amino acid sequence of SEQ ID NO:169
WHWLNLRPGQPMY

SEQ ID NO: 1130 - protein, 13 aa, Saccharomyces cerevisiae
  REGION 1..13: note = Amino acid sequence of SEQ ID NO:170
WHWLQLKPGQPMY

SEQ ID NO: 1131 - protein, 13 aa, Saccharomyces cerevisiae
  REGION 1..13: note = Amino acid sequence of SEQ ID NO:171
WHWLNLRPGQPMY

SEQ ID NO: 1132 - protein, 13 aa, Saccharomyces cerevisiae
  REGION 1..13: note = Amino acid sequence of SEQ ID NO:172
WHWLQLKPGQPMY

SEQ ID NO: 1133 - protein, 13 aa, Saccharomyces cerevisiae
  REGION 1..13: note = Amino acid sequence of SEQ ID NO:173
WHWLNLRPGQPMY

SEQ ID NO: 1134 - protein, 13 aa, Saccharomyces cerevisiae
  REGION 1..13: note = Amino acid sequence of SEQ ID NO:174
WHWLQLKPGQPMY

SEQ ID NO: 1135 - protein, 13 aa, Saccharomyces cerevisiae
  REGION 1..13: note = Amino acid sequence of SEQ ID NO:175
WHWLNLRPGQPMY

SEQ ID NO: 1136 - protein, 13 aa, Saccharomyces cerevisiae
  REGION 1..13: note = Amino acid sequence of SEQ ID NO:176
WHWLQLKPGQPMY

SEQ ID NO: 1137 - protein, 13 aa, Saccharomyces cerevisiae
  REGION 1..13: note = Amino acid sequence of SEQ ID NO:177
WHWLNLRPGQPMY

SEQ ID NO: 1138 - protein, 13 aa, Saccharomyces cerevisiae
  REGION 1..13: note = Amino acid sequence of SEQ ID NO:178
WHWLQLKPGQPMY

SEQ ID NO: 1139 - protein, 13 aa, Saccharomyces cerevisiae
  REGION 1..13: note = Amino acid sequence of SEQ ID NO:179
WHWLNLRPGQPMY

SEQ ID NO: 1140 - protein, 13 aa, Saccharomyces cerevisiae
  REGION 1..13: note = Amino acid sequence of SEQ ID NO:180
WHWLQLKPGQPMY

SEQ ID NO: 1141 - protein, 13 aa, Saccharomyces cerevisiae
  REGION 1..13: note = Amino acid sequence of SEQ ID NO:181
WHWLNLRPGQPMY

SEQ ID NO: 1142 - protein, 13 aa, Saccharomyces cerevisiae
  REGION 1..13: note = Amino acid sequence of SEQ ID NO:182
WHWLQLKPGQPMY

SEQ ID NO: 1143 - protein, 13 aa, Saccharomyces cerevisiae
  REGION 1..13: note = Amino acid sequence of SEQ ID NO:183
WHWLQLKPGQPMY

SEQ ID NO: 1144 - protein, 13 aa, Saccharomyces cerevisiae
  REGION 1..13: note = Amino acid sequence of SEQ ID NO:184
WHWLQLKPGQPMY

SEQ ID NO: 1145 - protein, 13 aa, Saccharomyces cerevisiae
  REGION 1..13: note = Amino acid sequence of SEQ ID NO:185
WHWLQLKPGQPMY

SEQ ID NO: 1146 - protein, 13 aa, Saccharomyces cerevisiae
  REGION 1..13: note = Amino acid sequence of SEQ ID NO:186
WHWLQLKPGQPMY

SEQ ID NO: 1147 - protein, 13 aa, Saccharomyces cerevisiae
  REGION 1..13: note = Amino acid sequence of SEQ ID NO:187
WHWLQLKPGQPMY

SEQ ID NO: 1148 - protein, 13 aa, Saccharomyces cerevisiae
  REGION 1..13: note = Amino acid sequence of SEQ ID NO:188
WHWLQLKPGQPMY

SEQ ID NO: 1149 - protein, 13 aa, Saccharomyces cerevisiae
  REGION 1..13: note = Amino acid sequence of SEQ ID NO:189
WHWLQLKPGQPMY

SEQ ID NO: 1150 - protein, 13 aa, Saccharomyces cerevisiae
  REGION 1..13: note = Amino acid sequence of SEQ ID NO:190
WHWLQLKPGQPMY

SEQ ID NO: 1151 - protein, 13 aa, Saccharomyces cerevisiae
  REGION 1..13: note = Amino acid sequence of SEQ ID NO:191
WHWLQLKPGQPMY

SEQ ID NO: 1152 - protein, 13 aa, Saccharomyces cerevisiae
  REGION 1..13: note = Amino acid sequence of SEQ ID NO:192
WHWLQLKPGQPMY

SEQ ID NO: 1153 - protein, 13 aa, Saccharomyces cerevisiae
  REGION 1..13: note = Amino acid sequence of SEQ ID NO:193
WHWLQLKPGQPMY

SEQ ID NO: 1154 - protein, 13 aa, Saccharomyces cerevisiae
  REGION 1..13: note = Amino acid sequence of SEQ ID NO:194
WHWLQLKPGQPMY

SEQ ID NO: 1155 - protein, 13 aa, Saccharomyces cerevisiae
  REGION 1..13: note = Amino acid sequence of SEQ ID NO:195
WHWLQLKPGQPMY

SEQ ID NO: 1156 - protein, 13 aa, Saccharomyces cerevisiae
  REGION 1..13: note = Amino acid sequence of SEQ ID NO:196
WHWLQLKPGQPMY

SEQ ID NO: 1157 - protein, 13 aa, Saccharomyces cerevisiae
  REGION 1..13: note = Amino acid sequence of SEQ ID NO:197
WHWLQLKPGQPMY

SEQ ID NO: 1158 - protein, 13 aa, Saccharomyces cerevisiae
  REGION 1..13: note = Amino acid sequence of SEQ ID NO:198
WHWLQLKPGQPMY

SEQ ID NO: 1159 - protein, 13 aa, Saccharomyces cerevisiae
  REGION 1..13: note = Amino acid sequence of SEQ ID NO:199
WHWLQLKPGQPMY

SEQ ID NO: 1160 - protein, 13 aa, Saccharomyces cerevisiae
  REGION 1..13: note = Amino acid sequence of SEQ ID NO:200
WHWLQLKPGQPMY

SEQ ID NO: 1161 - protein, 13 aa, Saccharomyces cerevisiae
  REGION 1..13: note = Amino acid sequence of SEQ ID NO:201
WHWLQLKPGQPMY

SEQ ID NO: 1162 - protein, 13 aa, Saccharomyces cerevisiae
  REGION 1..13: note = Amino acid sequence of SEQ ID NO:202
WHWLRLKPGQPMY

SEQ ID NO: 1163 - protein, 13 aa, Saccharomyces cerevisiae
  REGION 1..13: note = Amino acid sequence of SEQ ID NO:203
WHWLQLKPGQPMY

SEQ ID NO: 1164 - protein, 13 aa, Saccharomyces cerevisiae
  REGION 1..13: note = Amino acid sequence of SEQ ID NO:204
WHWLQLKPGQPMY

SEQ ID NO: 1165 - protein, 13 aa, Saccharomyces cerevisiae
  REGION 1..13: note = Amino acid sequence of SEQ ID NO:205
WHWLQLKPGQPMY

SEQ ID NO: 1166 - protein, 13 aa, Saccharomyces cerevisiae
  REGION 1..13: note = Amino acid sequence of SEQ ID NO:206
WHWLQLKPGQPMY

SEQ ID NO: 1167 - protein, 13 aa, Saccharomyces cerevisiae
  REGION 1..13: note = Amino acid sequence of SEQ ID NO:207
WHWLQLKPGQPMY

SEQ ID NO: 1168 - protein, 13 aa, Saccharomyces cerevisiae
  REGION 1..13: note = Amino acid sequence of SEQ ID NO:208
WHWLQLKPGQPMY

SEQ ID NO: 1169 - protein, 13 aa, Saccharomyces cerevisiae
  REGION 1..13: note = Amino acid sequence of SEQ ID NO:209
WHWLQLKPGQPMY

SEQ ID NO: 1170 - protein, 13 aa, Saccharomyces cerevisiae
  REGION 1..13: note = Amino acid sequence of SEQ ID NO:210
WHWLQLKPGQPMY

SEQ ID NO: 1171 - protein, 13 aa, Saccharomyces cerevisiae
  REGION 1..13: note = Amino acid sequence of SEQ ID NO:211
WHWLQLKPGQPMY

SEQ ID NO: 1172 - protein, 13 aa, Saccharomyces cerevisiae
  REGION 1..13: note = Amino acid sequence of SEQ ID NO:212
WHWLQLKPGQPMY

SEQ ID NO: 1173 - protein, 13 aa, Saccharomyces cerevisiae
  REGION 1..13: note = Amino acid sequence of SEQ ID NO:213
WHWLQLKPGQPMY

SEQ ID NO: 1174 - protein, 13 aa, Saccharomyces cerevisiae
  REGION 1..13: note = Amino acid sequence of SEQ ID NO:214
WHWLQLKPGQPMY

SEQ ID NO: 1175 - protein, 13 aa, Saccharomyces cerevisiae
  REGION 1..13: note = Amino acid sequence of SEQ ID NO:215
WHWLQLKPGQPMY

SEQ ID NO: 1176 - protein, 13 aa, Saccharomyces cerevisiae
  REGION 1..13: note = Amino acid sequence of SEQ ID NO:216
WHWLQLKPGQPMY

SEQ ID NO: 1177 - protein, 13 aa, Saccharomyces cerevisiae
  REGION 1..13: note = Amino acid sequence of SEQ ID NO:217
WHWLQLKPGQPMY

SEQ ID NO: 1178 - protein, 13 aa, Saccharomyces cerevisiae
  REGION 1..13: note = Amino acid sequence of SEQ ID NO:218
WHWLQLKPGQPMY

SEQ ID NO: 1179 - protein, 13 aa, Saccharomyces cerevisiae
  REGION 1..13: note = Amino acid sequence of SEQ ID NO:219
WHWLQLKPGQPMY

SEQ ID NO: 1180 - protein, 13 aa, Saccharomyces cerevisiae
  REGION 1..13: note = Amino acid sequence of SEQ ID NO:220
WHWLQLKPGQPMY

SEQ ID NO: 1181 - protein, 13 aa, Saccharomyces cerevisiae
  REGION 1..13: note = Amino acid sequence of SEQ ID NO:221
WHWLQLKPGQPMY

SEQ ID NO: 1182 - protein, 13 aa, Saccharomyces cerevisiae
  REGION 1..13: note = Amino acid sequence of SEQ ID NO:222
WHWLRLKPGQPMY

SEQ ID NO: 1183 - protein, 13 aa, Saccharomyces cerevisiae
  REGION 1..13: note = Amino acid sequence of SEQ ID NO:223
WHWLQLKPGQPMY

SEQ ID NO: 1184 - protein, 13 aa, Saccharomyces cerevisiae
  REGION 1..13: note = Amino acid sequence of SEQ ID NO:224
WHWLQLKPGQPMY

SEQ ID NO: 1185 - protein, 13 aa, Saccharomyces cerevisiae
  REGION 1..13: note = Amino acid sequence of SEQ ID NO:225
WHWLQLKPGQPMY

SEQ ID NO: 1186 - protein, 13 aa, Saccharomyces cerevisiae
  REGION 1..13: note = Amino acid sequence of SEQ ID NO:226
WHWLQLKPGQPMY

SEQ ID NO: 1187 - protein, 13 aa, Saccharomyces cerevisiae
  REGION 1..13: note = Amino acid sequence of SEQ ID NO:227
WHWLQLKPGQPMY

SEQ ID NO: 1188 - protein, 13 aa, Saccharomyces cerevisiae
  REGION 1..13: note = Amino acid sequence of SEQ ID NO:228
WHWLQLKPGQPMY

SEQ ID NO: 1189 - protein, 13 aa, Saccharomyces cerevisiae
  REGION 1..13: note = Amino acid sequence of SEQ ID NO:229
WHWLQLKPGQPMY

SEQ ID NO: 1190 - protein, 13 aa, Saccharomyces cerevisiae
  REGION 1..13: note = Amino acid sequence of SEQ ID NO:230
WHWLQLKPGQPMY

SEQ ID NO: 1191 - protein, 13 aa, Saccharomyces cerevisiae
  REGION 1..13: note = Amino acid sequence of SEQ ID NO:231
WHWLQLKPGQPMY

SEQ ID NO: 1192 - protein, 13 aa, Saccharomyces cerevisiae
  REGION 1..13: note = Amino acid sequence of SEQ ID NO:232
WHWLQLKPGQPMY

SEQ ID NO: 1193 - protein, 13 aa, Saccharomyces cerevisiae
  REGION 1..13: note = Amino acid sequence of SEQ ID NO:233
WHWLQLKPGQPMY

SEQ ID NO: 1194 - protein, 13 aa, Saccharomyces cerevisiae
  REGION 1..13: note = Amino acid sequence of SEQ ID NO:234
WHWLQLKPGQPMY

SEQ ID NO: 1195 - protein, 13 aa, Saccharomyces cerevisiae
  REGION 1..13: note = Amino acid sequence of SEQ ID NO:235
WHWLQLKPGQPMY

SEQ ID NO: 1196 - protein, 13 aa, Saccharomyces cerevisiae
  REGION 1..13: note = Amino acid sequence of SEQ ID NO:236
WHWLQLKPGQPMY

SEQ ID NO: 1197 - protein, 13 aa, Saccharomyces cerevisiae
  REGION 1..13: note = Amino acid sequence of SEQ ID NO:237
WHWLQLKPGQPMY

SEQ ID NO: 1198 - protein, 13 aa, Saccharomyces cerevisiae
  REGION 1..13: note = Amino acid sequence of SEQ ID NO:238
WHWLQLKPGQPMY

SEQ ID NO: 1199 - protein, 13 aa, Saccharomyces cerevisiae
  REGION 1..13: note = Amino acid sequence of SEQ ID NO:239
WHWLQLKPGQPMY

SEQ ID NO: 1200 - protein, 13 aa, Saccharomyces cerevisiae
  REGION 1..13: note = Amino acid sequence of SEQ ID NO:240
WHWLQLKPGQPMY

SEQ ID NO: 1201 - protein, 13 aa, Saccharomyces cerevisiae
  REGION 1..13: note = Amino acid sequence of SEQ ID NO:241
WHWLQLKPGQPMY

SEQ ID NO: 1202 - protein, 13 aa, Saccharomyces cerevisiae
  REGION 1..13: note = Amino acid sequence of SEQ ID NO:242
WHWLQLKPGQPMY

SEQ ID NO: 1203 - protein, 13 aa, Saccharomyces cerevisiae
  REGION 1..13: note = Amino acid sequence of SEQ ID NO:243
WHWLQLKPGQPMY

SEQ ID NO: 1204 - protein, 13 aa, Saccharomyces cerevisiae
  REGION 1..13: note = Amino acid sequence of SEQ ID NO:244
WHWLQLKPGQPMY

SEQ ID NO: 1205 - protein, 13 aa, Saccharomyces cerevisiae
  REGION 1..13: note = Amino acid sequence of SEQ ID NO:245
WHWLQLKPGQPMY

SEQ ID NO: 1206 - protein, 13 aa, Saccharomyces cerevisiae
  REGION 1..13: note = Amino acid sequence of SEQ ID NO:246
WHWLQLKPGQPMY

SEQ ID NO: 1207 - protein, 13 aa, Saccharomyces cerevisiae
  REGION 1..13: note = Amino acid sequence of SEQ ID NO:247
WHWLQLKPGQPMY

SEQ ID NO: 1208 - protein, 13 aa, Saccharomyces cerevisiae
  REGION 1..13: note = Amino acid sequence of SEQ ID NO:248
WHWLQLKPGQPMY

SEQ ID NO: 1209 - protein, 13 aa, Saccharomyces cerevisiae
  REGION 1..13: note = Amino acid sequence of SEQ ID NO:249
WHWLQLKPGQPMY

SEQ ID NO: 1210 - protein, 13 aa, Saccharomyces cerevisiae
  REGION 1..13: note = Amino acid sequence of SEQ ID NO:250
WHWLQLKPGQPMY

SEQ ID NO: 1211 - protein, 13 aa, Saccharomyces cerevisiae
  REGION 1..13: note = Amino acid sequence of SEQ ID NO:251
WHWLQLKPGQPMY

SEQ ID NO: 1212 - protein, 13 aa, Saccharomyces cerevisiae
  REGION 1..13: note = Amino acid sequence of SEQ ID NO:252
WHWLQLKPGQPMY

SEQ ID NO: 1213 - protein, 13 aa, Saccharomyces cerevisiae
  REGION 1..13: note = Amino acid sequence of SEQ ID NO:253
WHWLQLKPGQPMY

SEQ ID NO: 1214 - protein, 13 aa, Saccharomyces cerevisiae
  REGION 1..13: note = Amino acid sequence of SEQ ID NO:254
WHWLQLKPGQPMY

SEQ ID NO: 1215 - protein, 13 aa, Saccharomyces cerevisiae
  REGION 1..13: note = Amino acid sequence of SEQ ID NO:255
WHWLQLKPGQPMY

SEQ ID NO: 1216 - protein, 13 aa, Saccharomyces cerevisiae
  REGION 1..13: note = Amino acid sequence of SEQ ID NO:256
WHWLQLKPGQPMY

SEQ ID NO: 1217 - protein, 13 aa, Saccharomyces cerevisiae
  REGION 1..13: note = Amino acid sequence of SEQ ID NO:257
WHWLQLKPGQPMY

SEQ ID NO: 1218 - protein, 13 aa, Saccharomyces cerevisiae
  REGION 1..13: note = Amino acid sequence of SEQ ID NO:258
WHWLQLKPGQPMY

SEQ ID NO: 1219 - protein, 13 aa, Saccharomyces cerevisiae
  REGION 1..13: note = Amino acid sequence of SEQ ID NO:259
WHWLQLKPGQPMY

SEQ ID NO: 1220 - protein, 13 aa, Saccharomyces cerevisiae
  REGION 1..13: note = Amino acid sequence of SEQ ID NO:260
WHWLQLKPGQPMY

SEQ ID NO: 1221 - protein, 13 aa, Saccharomyces cerevisiae
  REGION 1..13: note = Amino acid sequence of SEQ ID NO:261
WHWLQLKPGQPMY

SEQ ID NO: 1222 - protein, 13 aa, Saccharomyces cerevisiae
  REGION 1..13: note = Amino acid sequence of SEQ ID NO:262
WHWLQLKPGQPMY

SEQ ID NO: 1223 - protein, 13 aa, Saccharomyces cerevisiae
  REGION 1..13: note = Amino acid sequence of SEQ ID NO:263
WHWLQLKPGQPMY

SEQ ID NO: 1224 - protein, 13 aa, Saccharomyces cerevisiae
  REGION 1..13: note = Amino acid sequence of SEQ ID NO:264
WHWLQLKPGQPMY

SEQ ID NO: 1225 - protein, 13 aa, Saccharomyces cerevisiae
  REGION 1..13: note = Amino acid sequence of SEQ ID NO:265
WHWLQLKPGQPMY

SEQ ID NO: 1226 - protein, 13 aa, Saccharomyces cerevisiae
  REGION 1..13: note = Amino acid sequence of SEQ ID NO:266
WHWLQLKPGQPMY

SEQ ID NO: 1227 - protein, 13 aa, Saccharomyces cerevisiae
  REGION 1..13: note = Amino acid sequence of SEQ ID NO:267
WHWLQLKPGQPMY

SEQ ID NO: 1228 - protein, 13 aa, Saccharomyces cerevisiae
  REGION 1..13: note = Amino acid sequence of SEQ ID NO:268
WHWLQLKPGQPMY

SEQ ID NO: 1229 - protein, 13 aa, Saccharomyces cerevisiae
  REGION 1..13: note = Amino acid sequence of SEQ ID NO:269
WHWLQLKPGQPMY

SEQ ID NO: 1230 - protein, 13 aa, Saccharomyces cerevisiae
  REGION 1..13: note = Amino acid sequence of SEQ ID NO:270
WHWLQLKPGQPMY

SEQ ID NO: 1231 - protein, 13 aa, Saccharomyces cerevisiae
  REGION 1..13: note = Amino acid sequence of SEQ ID NO:271
WHWLQLKPGQPMY

SEQ ID NO: 1232 - protein, 13 aa, Saccharomyces cerevisiae
  REGION 1..13: note = Amino acid sequence of SEQ ID NO:272
WHWLQLKPGQPMY

SEQ ID NO: 1233 - protein, 13 aa, Saccharomyces cerevisiae
  REGION 1..13: note = Amino acid sequence of SEQ ID NO:273
WHWLQLKPGQPMY

SEQ ID NO: 1234 - protein, 13 aa, Saccharomyces cerevisiae
  REGION 1..13: note = Amino acid sequence of SEQ ID NO:274
WHWLQLKPGQPMY

SEQ ID NO: 1235 - protein, 13 aa, Saccharomyces cerevisiae
  REGION 1..13: note = Amino acid sequence of SEQ ID NO:275
WHWLQLKPGQPMY

SEQ ID NO: 1236 - protein, 13 aa, Saccharomyces cerevisiae
  REGION 1..13: note = Amino acid sequence of SEQ ID NO:276
WHWLNLRPGQPMY

SEQ ID NO: 1237 - protein, 13 aa, Saccharomyces cerevisiae
  REGION 1..13: note = Amino acid sequence of SEQ ID NO:277
WHWLQLKPGQPMY

SEQ ID NO: 1238 - protein, 10 aa, Sclerotinia sclerotiorum
  REGION 1..10: note = Amino acid sequence of SEQ ID NO:278
WCGRPGQPCK

SEQ ID NO: 1239 - protein, 9 aa, Sclerotinia sclerotiorum
  REGION 1..9: note = Amino acid sequence of SEQ ID NO:279
WCGRPGQPC

SEQ ID NO: 1240 - protein, 10 aa, Cordyceps militaris
  REGION 1..10: note = Amino acid sequence of SEQ ID NO:280
WCTRPGQPCW

SEQ ID NO: 1241 - protein, 10 aa, Cordyceps militaris
  REGION 1..10: note = Amino acid sequence of SEQ ID NO:281
WCTRPGEPCW

SEQ ID NO: 1242 - protein, 10 aa, Cordyceps militaris
  REGION 1..10: note = Amino acid sequence of SEQ ID NO:282
WCLRPGQPCW

SEQ ID NO: 1243 - protein, 10 aa, Botrytis cinerea
  REGION 1..10: note = Amino acid sequence of SEQ ID NO:283
WCGRPGQPCK

SEQ ID NO: 1244 - protein, 9 aa, Botrytis cinerea
  REGION 1..9: note = Amino acid sequence of SEQ ID NO:284
WCGRPGQPC

SEQ ID NO: 1245 - protein, 13 aa, Kluyveromyces marxianus
  REGION 1..13: note = Amino acid sequence of SEQ ID NO:285
WKWLSFRVGQPIY

SEQ ID NO: 1246 - protein, 12 aa, Kluyveromyces marxianus
  REGION 1..12: note = Amino acid sequence of SEQ ID NO:286
WKWLSFRVGQPI

SEQ ID NO: 1247 - protein, 13 aa, Kluyveromyces marxianus
  REGION 1..13: note = Amino acid sequence of SEQ ID NO:287
WKWLSFRIGQPIY

SEQ ID NO: 1248 - protein, 12 aa, Kluyveromyces marxianus
  REGION 1..12: note = Amino acid sequence of SEQ ID NO:288
WKWLSFRIGQPI

SEQ ID NO: 1249 - protein, 13 aa, Kluyveromyces marxianus
  REGION 1..13: note = Amino acid sequence of SEQ ID NO:289
WKWLSLRVGQPIY

SEQ ID NO: 1250 - protein, 12 aa, Kluyveromyces marxianus
  REGION 1..12: note = Amino acid sequence of SEQ ID NO:290
WKWLSLRVGQPI

SEQ ID NO: 1251 - protein, 11 aa, Kluyveromyces marxianus
  REGION 1..11: note = Amino acid sequence of SEQ ID NO:291
WLSFRVGQPIY

SEQ ID NO: 1252 - protein, 13 aa, Kluyveromyces marxianus
  REGION 1..13: note = Amino acid sequence of SEQ ID NO:292
WEWLSLRVGQPLY

SEQ ID NO: 1253 - protein, 11 aa, Kluyveromyces marxianus
  REGION 1..11: note = Amino acid sequence of SEQ ID NO:293
WEWLSLRVGQP

SEQ ID NO: 1254 - protein, 11 aa, Kluyveromyces marxianus
  REGION 1..11: note = Amino acid sequence of SEQ ID NO:294
WLSFRIGQPIY

SEQ ID NO: 1255 - protein, 11 aa, Kluyveromyces marxianus
  REGION 1..11: note = Amino acid sequence of SEQ ID NO:295
WLSLRVGQPIY

SEQ ID NO: 1256 - protein, 13 aa, Kluyveromyces marxianus
  REGION 1..13: note = Amino acid sequence of SEQ ID NO:296
WKWLSFRVGQPIY

SEQ ID NO: 1257 - protein, 12 aa, Kluyveromyces marxianus
  REGION 1..12: note = Amino acid sequence of SEQ ID NO:297
WKWLSFRVGQPI

SEQ ID NO: 1258 - protein, 13 aa, Kluyveromyces marxianus
  REGION 1..13: note = Amino acid sequence of SEQ ID NO:298
WKWLSFRIGQPIY

SEQ ID NO: 1259 - protein, 12 aa, Kluyveromyces marxianus
  REGION 1..12: note = Amino acid sequence of SEQ ID NO:299
WKWLSFRIGQPI

SEQ ID NO: 1260 - protein, 13 aa, Kluyveromyces marxianus
  REGION 1..13: note = Amino acid sequence of SEQ ID NO:300
WKWLSLRVGQPIY

SEQ ID NO: 1261 - protein, 12 aa, Kluyveromyces marxianus
  REGION 1..12: note = Amino acid sequence of SEQ ID NO:301
WKWLSLRVGQPI

SEQ ID NO: 1262 - protein, 11 aa, Kluyveromyces marxianus
  REGION 1..11: note = Amino acid sequence of SEQ ID NO:302
WLSFRVGQPIY

SEQ ID NO: 1263 - protein, 13 aa, Kluyveromyces marxianus
  REGION 1..13: note = Amino acid sequence of SEQ ID NO:303
WEWLSLRVGQPLY

SEQ ID NO: 1264 - protein, 11 aa, Kluyveromyces marxianus
  REGION 1..11: note = Amino acid sequence of SEQ ID NO:304
WEWLSLRVGQP

SEQ ID NO: 1265 - protein, 11 aa, Kluyveromyces marxianus
  REGION 1..11: note = Amino acid sequence of SEQ ID NO:305
WLSFRIGQPIY

SEQ ID NO: 1266 - protein, 11 aa, Kluyveromyces marxianus
  REGION 1..11: note = Amino acid sequence of SEQ ID NO:306
WLSLRVGQPIY

SEQ ID NO: 1267 - protein, 13 aa, Saccharomyces cerevisiae
  REGION 1..13: note = Amino acid sequence of SEQ ID NO:307
WHWLNLRPGQPMY

SEQ ID NO: 1268 - protein, 13 aa, Saccharomyces cerevisiae
  REGION 1..13: note = Amino acid sequence of SEQ ID NO:308
WHWLQLKPGQPMY

SEQ ID NO: 1269 - protein, 13 aa, Saccharomyces cerevisiae
  REGION 1..13: note = Amino acid sequence of SEQ ID NO:309
WHWLQLKPGQPMY

SEQ ID NO: 1270 - protein, 13 aa, Saccharomyces cerevisiae
  REGION 1..13: note = Amino acid sequence of SEQ ID NO:310
WHWLNLRPGQPMY

SEQ ID NO: 1271 - protein, 13 aa, Saccharomyces cerevisiae
  REGION 1..13: note = Amino acid sequence of SEQ ID NO:311
WHWLQLKPGQPMY

SEQ ID NO: 1272 - protein, 13 aa, Saccharomyces cerevisiae
  REGION 1..13: note = Amino acid sequence of SEQ ID NO:312
WHWLNLRPGQPMY

SEQ ID NO: 1273 - protein, 13 aa, Saccharomyces cerevisiae
  REGION 1..13: note = Amino acid sequence of SEQ ID NO:313
WHWLQLKPGQPMY

SEQ ID NO: 1274 - protein, 13 aa, Saccharomyces cerevisiae
  REGION 1..13: note = Amino acid sequence of SEQ ID NO:314
WHWLNLRPGQPMY

SEQ ID NO: 1275 - protein, 13 aa, Saccharomyces cerevisiae
  REGION 1..13: note = Amino acid sequence of SEQ ID NO:315
WHWLQLKPGQPMY

SEQ ID NO: 1276 - protein, 13 aa, Saccharomyces cerevisiae
  REGION 1..13: note = Amino acid sequence of SEQ ID NO:316
WHWLQLKPGQPMY

SEQ ID NO: 1277 - protein, 13 aa, Saccharomyces cerevisiae
  REGION 1..13: note = Amino acid sequence of SEQ ID NO:317
WHWLQLKPGQPMY

SEQ ID NO: 1278 - protein, 13 aa, Saccharomyces cerevisiae
  REGION 1..13: note = Amino acid sequence of SEQ ID NO:318
WHWLQLKPGQPMY

SEQ ID NO: 1279 - protein, 13 aa, Saccharomyces cerevisiae
  REGION 1..13: note = Amino acid sequence of SEQ ID NO:319
WHWLNLRPGQPMY

SEQ ID NO: 1280 - protein, 13 aa, Saccharomyces cerevisiae
  REGION 1..13: note = Amino acid sequence of SEQ ID NO:320
WHWLQLKPGQPMY

SEQ ID NO: 1281 - protein, 13 aa, Saccharomyces cerevisiae
  REGION 1..13: note = Amino acid sequence of SEQ ID NO:321
WHWLNLRPGQPMY

SEQ ID NO: 1282 - protein, 13 aa, Saccharomyces cerevisiae
  REGION 1..13: note = Amino acid sequence of SEQ ID NO:322
WHWLQLKPGQPMY

SEQ ID NO: 1283 - protein, 13 aa, Saccharomyces cerevisiae
  REGION 1..13: note = Amino acid sequence of SEQ ID NO:323
WHWLNLRPGQPMY

SEQ ID NO: 1284 - protein, 13 aa, Saccharomyces cerevisiae
  REGION 1..13: note = Amino acid sequence of SEQ ID NO:324
WHWLQLKPGQPMY

SEQ ID NO: 1285 - protein, 13 aa, Saccharomyces cerevisiae
  REGION 1..13: note = Amino acid sequence of SEQ ID NO:325
WHWLNLRPGQPMY

SEQ ID NO: 1286 - protein, 13 aa, Saccharomyces cerevisiae
  REGION 1..13: note = Amino acid sequence of SEQ ID NO:326
WHWLQLKPGQPMY

SEQ ID NO: 1287 - protein, 13 aa, Saccharomyces cerevisiae
  REGION 1..13: note = Amino acid sequence of SEQ ID NO:327
WHWLQLKPGQPMY

SEQ ID NO: 1288 - protein, 13 aa, Saccharomyces cerevisiae
  REGION 1..13: note = Amino acid sequence of SEQ ID NO:328
WHWLQLKPGQPMY

SEQ ID NO: 1289 - protein, 13 aa, Saccharomyces cerevisiae
  REGION 1..13: note = Amino acid sequence of SEQ ID NO:329
WHWLQLKPGQPMY

SEQ ID NO: 1290 - protein, 13 aa, Saccharomyces cerevisiae
  REGION 1..13: note = Amino acid sequence of SEQ ID NO:330
WHWLQLKPGQPMY

SEQ ID NO: 1291 - protein, 12 aa, Kluyveromyces lactis
  REGION 1..12: note = Amino acid sequence of SEQ ID NO:331
WSWITLRPGQPI

SEQ ID NO: 1292 - protein, 10 aa, Zygosaccharomyces rouxii
  REGION 1..10: note = Amino acid sequence of SEQ ID NO:332
HFVELDPGQP

SEQ ID NO: 1293 - protein, 10 aa, Zygosaccharomyces rouxii
  REGION 1..10: note = Amino acid sequence of SEQ ID NO:333
HFIELDPGQP

SEQ ID NO: 1294 - protein, 13 aa, Lachancea thermotolerans
  REGION 1..13: note = Amino acid sequence of SEQ ID NO:334
WRWLSLARGQPMY

SEQ ID NO: 1295 - protein, 13 aa, Lachancea thermotolerans
  REGION 1..13: note = Amino acid sequence of SEQ ID NO:335
WRWLSLSRGQPMY

SEQ ID NO: 1296 - protein, 13 aa, Saccharomyces cerevisiae
  REGION 1..13: note = Amino acid sequence of SEQ ID NO:336
WHWLNLRPGQPMY

SEQ ID NO: 1297 - protein, 13 aa, Saccharomyces cerevisiae
  REGION 1..13: note = Amino acid sequence of SEQ ID NO:337
WHWLQLKPGQPMY

SEQ ID NO: 1298 - protein, 13 aa, Saccharomyces cerevisiae
  REGION 1..13: note = Amino acid sequence of SEQ ID NO:338
WHWLQLKPGQPMY

SEQ ID NO: 1299 - protein, 13 aa, Naumovozyma castellii
  REGION 1..13: note = Amino acid sequence of SEQ ID NO:339
WHWLRLDPGQPLY

SEQ ID NO: 1300 - protein, 13 aa, Naumovozyma castellii
  REGION 1..13: note = Amino acid sequence of SEQ ID NO:340
WHWLRLDPGQPLY

SEQ ID NO: 1301 - protein, 13 aa, Naumovozyma dairenensis
  REGION 1..13: note = Amino acid sequence of SEQ ID NO:341
WHWLRLDPGQPLY

SEQ ID NO: 1302 - protein, 13 aa, Naumovozyma dairenensis
  REGION 1..13: note = Amino acid sequence of SEQ ID NO:342
WHWLRLDPGQPLY

SEQ ID NO: 1303 - protein, 13 aa, Naumovozyma dairenensis
  REGION 1..13: note = Amino acid sequence of SEQ ID NO:343
WHWLRLDAGQPLY

SEQ ID NO: 1304 - protein, 10 aa, Botrytis cinerea
  REGION 1..10: note = Amino acid sequence of SEQ ID NO:344
WCGRPGQPCK

SEQ ID NO: 1305 - protein, 9 aa, Botrytis cinerea
  REGION 1..9: note = Amino acid sequence of SEQ ID NO:345
WCGRPGQPC

SEQ ID NO: 1306 - protein, 10 aa, Claviceps purpurea
  REGION 1..10: note = Amino acid sequence of SEQ ID NO:346
WCWRPGQGCW

SEQ ID NO: 1307 - protein, 10 aa, Claviceps purpurea
  REGION 1..10: note = Amino acid sequence of SEQ ID NO:347
WCWRPGEGCW

SEQ ID NO: 1308 - protein, 13 aa, Tetrapisispora phaffii
  REGION 1..13: note = Amino acid sequence of SEQ ID NO:348
WHWLRLDPGQPLY

SEQ ID NO: 1309 - protein, 13 aa, Kazachstania africana
  REGION 1..13: note = Amino acid sequence of SEQ ID NO:349
WHWLSIAPGQPMY

SEQ ID NO: 1310 - protein, 13 aa, Kazachstania africana
  REGION 1..13: note = Amino acid sequence of SEQ ID NO:350
WHWLSISPGQPMY

SEQ ID NO: 1311 - protein, 13 aa, Kazachstania africana
  REGION 1..13: note = Amino acid sequence of SEQ ID NO:351
WHWLSISPGQPMY

SEQ ID NO: 1312 - protein, 10 aa, Tetrapisispora blattae
  REGION 1..10: note = Amino acid sequence of SEQ ID NO:352
HWLRLGRGEP

SEQ ID NO: 1313 - protein, 12 aa, Tetrapisispora blattae
  REGION 1..12: note = Amino acid sequence of SEQ ID NO:353
HWLRLGRGEPLY

SEQ ID NO: 1314 - protein, 13 aa, Kazachstania naganishii
  REGION 1..13: note = Amino acid sequence of SEQ ID NO:354
WHWLRLSYGQPIY

SEQ ID NO: 1315 - protein, 12 aa, Kazachstania naganishii
  REGION 1..12: note = Amino acid sequence of SEQ ID NO:355
WHWLRLSYGQPI

SEQ ID NO: 1316 - protein, 11 aa, Kazachstania naganishii
  REGION 1..11: note = Amino acid sequence of SEQ ID NO:356
WHWLRLSYGQP

SEQ ID NO: 1317 - protein, 10 aa, Fusarium fujikuroi
  REGION 1..10: note = Amino acid sequence of SEQ ID NO:357
WCTWRGQPCW

SEQ ID NO: 1318 - protein, 10 aa, Fusarium fujikuroi
  REGION 1..10: note = Amino acid sequence of SEQ ID NO:358
WCMWRGQPCW

SEQ ID NO: 1319 - protein, 12 aa, Kluyveromyces dobzhanskii
  REGION 1..12: note = Amino acid sequence of SEQ ID NO:359
WSWISLRPGQPI

SEQ ID NO: 1320 - protein, 12 aa, Kluyveromyces dobzhanskii
  REGION 1..12: note = Amino acid sequence of SEQ ID NO:360
WSWISLRRGQPI

SEQ ID NO: 1321 - protein, 10 aa, Fusarium graminearum
  REGION 1..10: note = Amino acid sequence of SEQ ID NO:361
WCTWKGQPCW

SEQ ID NO: 1322 - protein, 10 aa, Fusarium graminearum
  REGION 1..10: note = Amino acid sequence of SEQ ID NO:362
WCWWKGQPCW

SEQ ID NO: 1323 - protein, 10 aa, Fusarium venenatum
  REGION 1..10: note = Amino acid sequence of SEQ ID NO:363
WCTWKGQPCW

SEQ ID NO: 1324 - protein, 10 aa, Fusarium venenatum
  REGION 1..10: note = Amino acid sequence of SEQ ID NO:364
WCWWKGQPCW

SEQ ID NO: 1325 - protein, 13 aa, Lachancea lanzarotensis
  REGION 1..13: note = Amino acid sequence of SEQ ID NO:365
WRWLSLARGQPMY

SEQ ID NO: 1326 - protein, 10 aa, Verticillium longisporum
  REGION 1..10: note = Amino acid sequence of SEQ ID NO:366
PCPRPGQGCW

SEQ ID NO: 1327 - protein, 10 aa, Verticillium longisporum
  REGION 1..10: note = Amino acid sequence of SEQ ID NO:367
PCPRPGQGCW

SEQ ID NO: 1328 - protein, 10 aa, Verticillium longisporum
  REGION 1..10: note = Amino acid sequence of SEQ ID NO:368
PCPRPGQGCW

SEQ ID NO: 1329 - protein, 13 aa, Lachancea quebecensis
  REGION 1..13: note = Amino acid sequence of SEQ ID NO:369
WRWLSLSRGQPMY

SEQ ID NO: 1330 - protein, 13 aa, Lachancea quebecensis
  REGION 1..13: note = Amino acid sequence of SEQ ID NO:370
WRWLRLSRGQPMY

SEQ ID NO: 1331 - protein, 11 aa, Lachancea quebecensis
  REGION 1..11: note = Amino acid sequence of SEQ ID NO:371
WLSLSRGQPMY

SEQ ID NO: 1332 - protein, 11 aa, Lachancea quebecensis
  REGION 1..11: note = Amino acid sequence of SEQ ID NO:372
WLRLSRGQPMY

SEQ ID NO: 1333 - protein, 10 aa, Fusarium proliferatum
  REGION 1..10: note = Amino acid sequence of SEQ ID NO:373
WCMWRGQPCW

SEQ ID NO: 1334 - protein, 10 aa, Fusarium proliferatum
  REGION 1..10: note = Amino acid sequence of SEQ ID NO:374
WCTWRGQPCW

SEQ ID NO: 1335 - protein, 10 aa, Fusarium mangiferae
  REGION 1..10: note = Amino acid sequence of SEQ ID NO:375
WCTWRGQPCW

SEQ ID NO: 1336 - protein, 10 aa, Fusarium mangiferae
  REGION 1..10: note = Amino acid sequence of SEQ ID NO:376
WCMWRGQPCW

SEQ ID NO: 1337 - protein, 10 aa, Fusarium proliferatum
  REGION 1..10: note = Amino acid sequence of SEQ ID NO:377
WCTWRGQPCW

SEQ ID NO: 1338 - protein, 10 aa, Fusarium proliferatum
  REGION 1..10: note = Amino acid sequence of SEQ ID NO:378
WCMWRGQPCW

SEQ ID NO: 1339 - protein, 13 aa, Saccharomyces cerevisiae
  REGION 1..13: note = Amino acid sequence of SEQ ID NO:379
WHWLNLRPGQPMY

SEQ ID NO: 1340 - protein, 13 aa, Saccharomyces cerevisiae
  REGION 1..13: note = Amino acid sequence of SEQ ID NO:380
WHWLQLKPGQPMY

SEQ ID NO: 1341 - protein, 13 aa, Saccharomyces cerevisiae
  REGION 1..13: note = Amino acid sequence of SEQ ID NO:381
WHWLQLKPGQPMY

SEQ ID NO: 1342 - protein, 13 aa, Saccharomyces cerevisiae
  REGION 1..13: note = Amino acid sequence of SEQ ID NO:382
WHWLQLKPGQPMY

SEQ ID NO: 1343 - protein, 13 aa, Saccharomyces cerevisiae
  REGION 1..13: note = Amino acid sequence of SEQ ID NO:383
WHWLNLRPGQPMY

SEQ ID NO: 1344 - protein, 13 aa, Saccharomyces cerevisiae
  REGION 1..13: note = Amino acid sequence of SEQ ID NO:384
WHWLQLKPGQPMY

SEQ ID NO: 1345 - protein, 10 aa, Sclerotinia sclerotiorum
  REGION 1..10: note = Amino acid sequence of SEQ ID NO:385
WCGRPGQPCK

SEQ ID NO: 1346 - protein, 9 aa, Sclerotinia sclerotiorum
  REGION 1..9: note = Amino acid sequence of SEQ ID NO:386
WCGRPGQPC

SEQ ID NO: 1347 - protein, 13 aa, Vanderwaltozyma polyspora
  REGION 1..13: note = Amino acid sequence of SEQ ID NO:387
WHWLRLRYGEPIY

SEQ ID NO: 1348 - protein, 12 aa, Vanderwaltozyma polyspora
  REGION 1..12: note = Amino acid sequence of SEQ ID NO:388
WHWLELDNGQPI

SEQ ID NO: 1349 - protein, 13 aa, Vanderwaltozyma polyspora
  REGION 1..13: note = Amino acid sequence of SEQ ID NO:389
WHWLELDNGQPIY

SEQ ID NO: 1350 - protein, 13 aa, Saccharomyces cerevisiae
  REGION 1..13: note = Amino acid sequence of SEQ ID NO:390
WHWLNLRPGQPMY

SEQ ID NO: 1351 - protein, 13 aa, Saccharomyces cerevisiae
  REGION 1..13: note = Amino acid sequence of SEQ ID NO:391
WHWLQLKPGQPMY

SEQ ID NO: 1352 - protein, 13 aa, Saccharomyces cerevisiae
  REGION 1..13: note = Amino acid sequence of SEQ ID NO:392
WHWLQLKPGQPMY

SEQ ID NO: 1353 - protein, 13 aa, Saccharomyces cerevisiae
  REGION 1..13: note = Amino acid sequence of SEQ ID NO:393
WHWLNLRPGQPMY

SEQ ID NO: 1354 - protein, 13 aa, Saccharomyces cerevisiae
  REGION 1..13: note = Amino acid sequence of SEQ ID NO:394
WHWLQLKPGQPMY

SEQ ID NO: 1355 - protein, 13 aa, Saccharomyces cerevisiae
  REGION 1..13: note = Amino acid sequence of SEQ ID NO:395
WHWLQLKPGQPMY

SEQ ID NO: 1356 - protein, 10 aa, Verticillium alfalfae
  REGION 1..10: note = Amino acid sequence of SEQ ID NO:396
PCPRPGQGCW

SEQ ID NO: 1357 - protein, 10 aa, Metarhizium acridum
  REGION 1..10: note = Amino acid sequence of SEQ ID NO:397
WCYRPGQPCW

SEQ ID NO: 1358 - protein, 10 aa, Metarhizium acridum
  REGION 1..10: note = Amino acid sequence of SEQ ID NO:398
WCWRPGQPCW

SEQ ID NO: 1359 - protein, 10 aa, Metarhizium acridum
  REGION 1..10: note = Amino acid sequence of SEQ ID NO:399
WCWQPGQPCW

SEQ ID NO: 1360 - protein, 10 aa, Metarhizium robertsii
  REGION 1..10: note = Amino acid sequence of SEQ ID NO:400
WCWQPGQPCW

SEQ ID NO: 1361 - protein, 10 aa, Metarhizium robertsii
  REGION 1..10: note = Amino acid sequence of SEQ ID NO:401
WCWRPGQPCW

SEQ ID NO: 1362 - protein, 13 aa, Saccharomyces cerevisiae
  REGION 1..13: note = Amino acid sequence of SEQ ID NO:402
WHWLQLKPGQPMY

SEQ ID NO: 1363 - protein, 13 aa, Saccharomyces cerevisiae
  REGION 1..13: note = Amino acid sequence of SEQ ID NO:403
WHWLNLRPGQPMY

SEQ ID NO: 1364 - protein, 13 aa, Saccharomyces cerevisiae
  REGION 1..13: note = Amino acid sequence of SEQ ID NO:404
WHWLQLKPGQPMY

SEQ ID NO: 1365 - protein, 13 aa, Saccharomyces cerevisiae
  REGION 1..13: note = Amino acid sequence of SEQ ID NO:405
WHWLNLRPGQPMY

SEQ ID NO: 1366 - protein, 13 aa, Saccharomyces cerevisiae
  REGION 1..13: note = Amino acid sequence of SEQ ID NO:406
WHWLQLKPGQPMY

SEQ ID NO: 1367 - protein, 13 aa, Saccharomyces cerevisiae
  REGION 1..13: note = Amino acid sequence of SEQ ID NO:407
WHWLQLKPGQPMY

SEQ ID NO: 1368 - protein, 13 aa, Saccharomyces cerevisiae
  REGION 1..13: note = Amino acid sequence of SEQ ID NO:408
WHWLNLRPGQPMY

SEQ ID NO: 1369 - protein, 13 aa, Saccharomyces cerevisiae
  REGION 1..13: note = Amino acid sequence of SEQ ID NO:409
WHWLQLKPGQPMY

SEQ ID NO: 1370 - protein, 13 aa, Saccharomyces cerevisiae
  REGION 1..13: note = Amino acid sequence of SEQ ID NO:410
WHWLQLKPGQPMY

SEQ ID NO: 1371 - protein, 13 aa, Saccharomyces cerevisiae
  REGION 1..13: note = Amino acid sequence of SEQ ID NO:411
WHWLNLRPGQPMY

SEQ ID NO: 1372 - protein, 13 aa, Saccharomyces cerevisiae
  REGION 1..13: note = Amino acid sequence of SEQ ID NO:412
WHWLQLKPGQPMY

SEQ ID NO: 1373 - protein, 13 aa, Saccharomyces cerevisiae
  REGION 1..13: note = Amino acid sequence of SEQ ID NO:413
WHWLQLKPGQPMY

SEQ ID NO: 1374 - protein, 13 aa, Saccharomyces cerevisiae
  REGION 1..13: note = Amino acid sequence of SEQ ID NO:414
WHWLNLRPGQPMY

SEQ ID NO: 1375 - protein, 13 aa, Saccharomyces cerevisiae
  REGION 1..13: note = Amino acid sequence of SEQ ID NO:415
WHWLQLKPGQPMY

SEQ ID NO: 1376 - protein, 13 aa, Saccharomyces cerevisiae
  REGION 1..13: note = Amino acid sequence of SEQ ID NO:416
WHWLQLKPGQPMY

SEQ ID NO: 1377 - protein, 13 aa, Saccharomyces cerevisiae
  REGION 1..13: note = Amino acid sequence of SEQ ID NO:417
WHWLNLRPGQPMY

SEQ ID NO: 1378 - protein, 13 aa, Saccharomyces cerevisiae
  REGION 1..13: note = Amino acid sequence of SEQ ID NO:418
WHWLQLKPGQPMY

SEQ ID NO: 1379 - protein, 10 aa, Fusarium oxysporum
  REGION 1..10: note = Amino acid sequence of SEQ ID NO:419
WCTWRGQPCW

SEQ ID NO: 1380 - protein, 10 aa, Fusarium oxysporum
  REGION 1..10: note = Amino acid sequence of SEQ ID NO:420
WCMWRGQPCW

SEQ ID NO: 1381 - protein, 10 aa, Fusarium oxysporum
  REGION 1..10: note = Amino acid sequence of SEQ ID NO:421
WCLWRGQPCW

SEQ ID NO: 1382 - protein, 10 aa, Fusarium oxysporum
  REGION 1..10: note = Amino acid sequence of SEQ ID NO:422
WCTWRGQPCW

SEQ ID NO: 1383 - protein, 10 aa, Verticillium dahliae
  REGION 1..10: note = Amino acid sequence of SEQ ID NO:423
PCPRPGQGCW

SEQ ID NO: 1384 - protein, 10 aa, Pyricularia oryzae
  REGION 1..10: note = Amino acid sequence of SEQ ID NO:424
WCPRRGQPCW

SEQ ID NO: 1385 - protein, 13 aa, Saccharomyces sp.
  REGION 1..13: note = Amino acid sequence of SEQ ID NO:425
  source 1..13: note = Saccharomyces cerevisiae x Saccharomyces kudriavzevii VIN7
WHWLQLKPGQPMY

SEQ ID NO: 1386 - protein, 13 aa, Saccharomyces sp.
  REGION 1..13: note = Amino acid sequence of SEQ ID NO:426
  source 1..13: note = Saccharomyces cerevisiae x Saccharomyces kudriavzevii VIN7
WHWLNLRPGQPMY

SEQ ID NO: 1387 - protein, 13 aa, Saccharomyces sp.
  REGION 1..13: note = Amino acid sequence of SEQ ID NO:427
  source 1..13: note = Saccharomyces cerevisiae x Saccharomyces kudriavzevii VIN7
WHWLQLKPGQPMY

SEQ ID NO: 1388 - protein, 13 aa, Saccharomyces cerevisiae
  REGION 1..13: note = Amino acid sequence of SEQ ID NO:428
WHWLQLKPGQPMY

SEQ ID NO: 1389 - protein, 13 aa, Saccharomyces cerevisiae
  REGION 1..13: note = Amino acid sequence of SEQ ID NO:429
WHWLNLRPGQPMY

SEQ ID NO: 1390 - protein, 13 aa, Saccharomyces cerevisiae
  REGION 1..13: note = Amino acid sequence of SEQ ID NO:430
WHWLQLKPGQPMY

SEQ ID NO: 1391 - protein, 10 aa, Beauveria bassiana
  REGION 1..10: note = Amino acid sequence of SEQ ID NO:431
WCMRPGQPCW

SEQ ID NO: 1392 - protein, 13 aa, Saccharomyces kudriavzevii
  REGION 1..13: note = Amino acid sequence of SEQ ID NO:432
WHWLQLKPGQPMY

SEQ ID NO: 1393 - protein, 13 aa, Saccharomyces kudriavzevii
  REGION 1..13: note = Amino acid sequence of SEQ ID NO:433
WHWLQLKPGQPMY

SEQ ID NO: 1394 - protein, 13 aa, Saccharomyces kudriavzevii
  REGION 1..13: note = Amino acid sequence of SEQ ID NO:434
WHWLQLRPGQPMY

SEQ ID NO: 1395 - protein, 10 aa, Fusarium pseudograminearum
  REGION 1..10: note = Amino acid sequence of SEQ ID NO:435
WCTWKGQPCW

SEQ ID NO: 1396 - protein, 10 aa, Fusarium pseudograminearum
  REGION 1..10: note = Amino acid sequence of SEQ ID NO:436
WCWWKGQPCW

SEQ ID NO: 1397 - protein, 10 aa, Pyricularia oryzae
  REGION 1..10: note = Amino acid sequence of SEQ ID NO:437
WCPRRGQPCW

SEQ ID NO: 1398 - protein, 10 aa, Pyricularia oryzae
  REGION 1..10: note = Amino acid sequence of SEQ ID NO:438
WCPRRGQPCW

SEQ ID NO: 1399 - protein, 9 aa, Pseudogymnoascus destructans
  REGION 1..9: note = Amino acid sequence of SEQ ID NO:439
CWRPGQPCG

SEQ ID NO: 1400 - protein, 9 aa, Botrytis cinerea
  REGION 1..9: note = Amino acid sequence of SEQ ID NO:440
WCGRPGQPC

SEQ ID NO: 1401 - protein, 10 aa, Botrytis cinerea
  REGION 1..10: note = Amino acid sequence of SEQ ID NO:441
WCGRPGQPCK

SEQ ID NO: 1402 - protein, 10 aa, Fusarium odoratissimum
  REGION 1..10: note = Amino acid sequence of SEQ ID NO:442
WCMWRGQPCW

SEQ ID NO: 1403 - protein, 10 aa, Fusarium odoratissimum
  REGION 1..10: note = Amino acid sequence of SEQ ID NO:443
WCLWRGQPCW

SEQ ID NO: 1404 - protein, 10 aa, Fusarium odoratissimum
  REGION 1..10: note = Amino acid sequence of SEQ ID NO:444
WCTWRGQPCW

SEQ ID NO: 1405 - protein, 10 aa, Fusarium oxysporum
  REGION 1..10: note = Amino acid sequence of SEQ ID NO:445
  source 1..10: note = f. sp. cubense race 1
WCMWRGQPCW

SEQ ID NO: 1406 - protein, 10 aa, Fusarium oxysporum
  REGION 1..10: note = Amino acid sequence of SEQ ID NO:446
  source 1..10: note = f. sp. cubense race 1
WCLWRGQPCW

SEQ ID NO: 1407 - protein, 10 aa, Fusarium oxysporum
  REGION 1..10: note = Amino acid sequence of SEQ ID NO:447
  source 1..10: note = f. sp. cubense race 1
WCTWRGQPCW

SEQ ID NO: 1408 - protein, 10 aa, Fusarium graminearum
  REGION 1..10: note = Amino acid sequence of SEQ ID NO:448
WCTWKGQPCW

SEQ ID NO: 1409 - protein, 10 aa, Fusarium graminearum
  REGION 1..10: note = Amino acid sequence of SEQ ID NO:449
WCWWKGQPCW

SEQ ID NO: 1410 - protein, 9 aa, Sclerotinia borealis
  REGION 1..9: note = Amino acid sequence of SEQ ID NO:450
WCGRPGQPC

SEQ ID NO: 1411 - protein, 10 aa, Sclerotinia borealis
  REGION 1..10: note = Amino acid sequence of SEQ ID NO:451
WCGRPGQPCK

SEQ ID NO: 1412 - protein, 10 aa, Fusarium verticillioides
  REGION 1..10: note = Amino acid sequence of SEQ ID NO:452
WCTWRGQPCW

SEQ ID NO: 1413 - protein, 10 aa, Fusarium verticillioides
  REGION 1..10: note = Amino acid sequence of SEQ ID NO:453
WCMWRGQPCW

SEQ ID NO: 1414 - protein, 13 aa, Saccharomyces cerevisiae
  REGION 1..13: note = Amino acid sequence of SEQ ID NO:454
WHWLQLKPGQPMY

SEQ ID NO: 1415 - protein, 13 aa, Saccharomyces cerevisiae
  REGION 1..13: note = Amino acid sequence of SEQ ID NO:455
WHWLNLRPGQPMY

SEQ ID NO: 1416 - protein, 13 aa, Saccharomyces cerevisiae
  REGION 1..13: note = Amino acid sequence of SEQ ID NO:456
WHWLQLKPGQPMY

SEQ ID NO: 1417 - protein, 13 aa, Saccharomyces cerevisiae
  REGION 1..13: note = Amino acid sequence of SEQ ID NO:457
WHWLQLKPGQPMY

SEQ ID NO: 1418 - protein, 13 aa, Saccharomyces cerevisiae
  REGION 1..13: note = Amino acid sequence of SEQ ID NO:458
WHWLNLRPGQPMY

SEQ ID NO: 1419 - protein, 13 aa, Saccharomyces cerevisiae
  REGION 1..13: note = Amino acid sequence of SEQ ID NO:459
WHWLQLKPGQPMY

SEQ ID NO: 1420 - protein, 10 aa, Fusarium oxysporum
  REGION 1..10: note = Amino acid sequence of SEQ ID NO:460
WCLWRGQPCW

SEQ ID NO: 1421 - protein, 10 aa, Fusarium oxysporum
  REGION 1..10: note = Amino acid sequence of SEQ ID NO:461
WCTWRGQPCW

SEQ ID NO: 1422 - protein, 10 aa, Fusarium oxysporum
  REGION 1..10: note = Amino acid sequence of SEQ ID NO:462
WCMWRGQPCW

SEQ ID NO: 1423 - protein, 10 aa, Fusarium oxysporum
  REGION 1..10: note = Amino acid sequence of SEQ ID NO:463
WCLWRGQPCW

SEQ ID NO: 1424 - protein, 10 aa, Fusarium oxysporum
  REGION 1..10: note = Amino acid sequence of SEQ ID NO:464
WCTWRGQPCW

SEQ ID NO: 1425 - protein, 10 aa, Fusarium oxysporum
  REGION 1..10: note = Amino acid sequence of SEQ ID NO:465
WCMWRGQPCW

SEQ ID NO: 1426 - protein, 10 aa, Fusarium oxysporum
  REGION 1..10: note = Amino acid sequence of SEQ ID NO:466
WCMWRGQPCW

SEQ ID NO: 1427 - protein, 10 aa, Fusarium oxysporum
  REGION 1..10: note = Amino acid sequence of SEQ ID NO:467
WCLWRGQPCW

SEQ ID NO: 1428 - protein, 10 aa, Fusarium oxysporum
  REGION 1..10: note = Amino acid sequence of SEQ ID NO:468
WCTWRGQPCW

SEQ ID NO: 1429 - protein, 10 aa, Fusarium oxysporum
  REGION 1..10: note = Amino acid sequence of SEQ ID NO:469
WCMWRGQPCW

SEQ ID NO: 1430 - protein, 10 aa, Fusarium oxysporum
  REGION 1..10: note = Amino acid sequence of SEQ ID NO:470
WCLWRGQPCW

SEQ ID NO: 1431 - protein, 10 aa, Fusarium oxysporum
  REGION 1..10: note = Amino acid sequence of SEQ ID NO:471
WCTWRGQPCW

SEQ ID NO: 1432 - protein, 10 aa, Fusarium oxysporum
  REGION 1..10: note = Amino acid sequence of SEQ ID NO:472
WCTWRGQPCW

SEQ ID NO: 1433 - protein, 10 aa, Fusarium oxysporum
  REGION 1..10: note = Amino acid sequence of SEQ ID NO:473
WCMWRGQPCW

SEQ ID NO: 1434 - protein, 10 aa, Fusarium oxysporum
  REGION 1..10: note = Amino acid sequence of SEQ ID NO:474
WCLWRGQPCW

SEQ ID NO: 1435 - protein, 10 aa, Fusarium oxysporum
  REGION 1..10: note = Amino acid sequence of SEQ ID NO:475
WCMWRGQPCW

SEQ ID NO: 1436 - protein, 10 aa, Fusarium oxysporum
  REGION 1..10: note = Amino acid sequence of SEQ ID NO:476
WCLWRGQPCW

SEQ ID NO: 1437 - protein, 10 aa, Fusarium oxysporum
  REGION 1..10: note = Amino acid sequence of SEQ ID NO:477
WCTWRGQPCW

SEQ ID NO: 1438 - protein, 10 aa, Fusarium oxysporum
  REGION 1..10: note = Amino acid sequence of SEQ ID NO:478
WCMWRGQPCW

SEQ ID NO: 1439 - protein, 10 aa, Fusarium oxysporum
  REGION 1..10: note = Amino acid sequence of SEQ ID NO:479
WCLWRGQPCW

SEQ ID NO: 1440 - protein, 10 aa, Fusarium oxysporum
  REGION 1..10: note = Amino acid sequence of SEQ ID NO:480
WCTWRGQPCW

SEQ ID NO: 1441 - protein, 10 aa, Fusarium oxysporum
  REGION 1..10: note = Amino acid sequence of SEQ ID NO:481
WCLWRGQPCW

SEQ ID NO: 1442 - protein, 10 aa, Fusarium oxysporum
  REGION 1..10: note = Amino acid sequence of SEQ ID NO:482
WCTWRGQPCW

SEQ ID NO: 1443 - protein, 10 aa, Fusarium oxysporum
  REGION 1..10: note = Amino acid sequence of SEQ ID NO:483
WCMWRGQPCW

SEQ ID NO: 1444 - protein, 10 aa, Fusarium odoratissimum
  REGION 1..10: note = Amino acid sequence of SEQ ID NO:484
WCTWRGQPCW

SEQ ID NO: 1445 - protein, 10 aa, Fusarium odoratissimum
  REGION 1..10: note = Amino acid sequence of SEQ ID NO:485
WCLWRGQPCW

SEQ ID NO: 1446 - protein, 10 aa, Fusarium odoratissimum
  REGION 1..10: note = Amino acid sequence of SEQ ID NO:486
WCMWRGQPCW

SEQ ID NO: 1447 - protein, 10 aa, Fusarium oxysporum
  REGION 1..10: note = Amino acid sequence of SEQ ID NO:487
WCTWRGQPCW

SEQ ID NO: 1448 - protein, 10 aa, Fusarium oxysporum
  REGION 1..10: note = Amino acid sequence of SEQ ID NO:488
WCLWRGQPCW

SEQ ID NO: 1449 - protein, 10 aa, Fusarium oxysporum
  REGION 1..10: note = Amino acid sequence of SEQ ID NO:489
WCMWRGQPCW

SEQ ID NO: 1450 - protein, 10 aa, Metarhizium robertsii
  REGION 1..10: note = Amino acid sequence of SEQ ID NO:490
WCWRPGQPCW

SEQ ID NO: 1451 - protein, 10 aa, Metarhizium robertsii
  REGION 1..10: note = Amino acid sequence of SEQ ID NO:491
WCWQPGQPCW

SEQ ID NO: 1452 - protein, 10 aa, Fusarium graminearum
  REGION 1..10: note = Amino acid sequence of SEQ ID NO:492
WCTWKGQPCW

SEQ ID NO: 1453 - protein, 10 aa, Fusarium graminearum
  REGION 1..10: note = Amino acid sequence of SEQ ID NO:493
WCWWKGQPCW

SEQ ID NO: 1454 - protein, 13 aa, Saccharomyces cerevisiae
  REGION 1..13: note = Amino acid sequence of SEQ ID NO:494
WHWLNLRPGQPMY

SEQ ID NO: 1455 - protein, 13 aa, Saccharomyces cerevisiae
  REGION 1..13: note = Amino acid sequence of SEQ ID NO:495
WHWLQLKPGQPMY

SEQ ID NO: 1456 - protein, 13 aa, Saccharomyces cerevisiae
  REGION 1..13: note = Amino acid sequence of SEQ ID NO:496
WHWLQLKPGQPMY

SEQ ID NO: 1457 - protein, 10 aa, Ustilaginoidea virens
  REGION 1..10: note = Amino acid sequence of SEQ ID NO:497
WCDRPGQPCW

SEQ ID NO: 1458 - protein, 10 aa, Ustilaginoidea virens
  REGION 1..10: note = Amino acid sequence of SEQ ID NO:498
WCWRPGEPCW

SEQ ID NO: 1459 - protein, 10 aa, Ustilaginoidea virens
  REGION 1..10: note = Amino acid sequence of SEQ ID NO:499
WCWRPGQPCW

SEQ ID NO: 1460 - protein, 10 aa, Zygosaccharomyces rouxii
  REGION 1..10: note = Amino acid sequence of SEQ ID NO:500
HFVELDPGQP

SEQ ID NO: 1461 - protein, 10 aa, Zygosaccharomyces rouxii
  REGION 1..10: note = Amino acid sequence of SEQ ID NO:501
HFIELDPGQP

SEQ ID NO: 1462 - protein, 10 aa, Zygosaccharomyces rouxii
  REGION 1..10: note = Amino acid sequence of SEQ ID NO:502
HFVELDPGQP

SEQ ID NO: 1463 - protein, 13 aa, Saccharomyces cerevisiae
  REGION 1..13: note = Amino acid sequence of SEQ ID NO:503
WHWLNLRPGQPMY

SEQ ID NO: 1464 - protein, 13 aa, Saccharomyces cerevisiae
  REGION 1..13: note = Amino acid sequence of SEQ ID NO:504
WHWLQLKPGQPMY

SEQ ID NO: 1465 - protein, 13 aa, Saccharomyces cerevisiae
  REGION 1..13: note = Amino acid sequence of SEQ ID NO:505
WHWLQLKPGQPMY

SEQ ID NO: 1466 - protein, 11 aa, unidentified
  REGION 1..11: note = Amino acid sequence of SEQ ID NO:506 (from Candida)
WGWLRFYPGEP

SEQ ID NO: 1467 - protein, 11 aa, unidentified
  REGION 1..11: note = Amino acid sequence of SEQ ID NO:507 (from Candida)
WGWLRFFPGEP

SEQ ID NO: 1468 - protein, 10 aa, Zygosaccharomyces mellis
  REGION 1..10: note = Amino acid sequence of SEQ ID NO:508
HFIELDAGQP

SEQ ID NO: 1469 - protein, 10 aa, Zygosaccharomyces mellis
  REGION 1..10: note = Amino acid sequence of SEQ ID NO:509
HFVELDPGQP

SEQ ID NO: 1470 - protein, 12 aa, Metschnikowia sp.
  REGION 1..12: note = Amino acid sequence of SEQ ID NO:510
  source 1..12: note = JCM 33374
WHWVALGLGQPM

SEQ ID NO: 1471 - protein, 11 aa, Metschnikowia sp.
  REGION 1..11: note = Amino acid sequence of SEQ ID NO:511
  source 1..11: note = JCM 33374
WHWVALGLGQP

SEQ ID NO: 1472 - protein, 12 aa, Metschnikowia sp.
  REGION 1..12: note = Amino acid sequence of SEQ ID NO:512
  source 1..12: note = JCM 33374
WHWVSLGLGQPM

SEQ ID NO: 1473 - protein, 11 aa, Metschnikowia sp.
  REGION 1..11: note = Amino acid sequence of SEQ ID NO:513
  source 1..11: note = JCM 33374
WHWVSLGLGQP

SEQ ID NO: 1474 - protein, 12 aa, Metschnikowia sp.
  REGION 1..12: note = Amino acid sequence of SEQ ID NO:514
  source 1..12: note = JCM 33374
WHWVALGLGQPM

SEQ ID NO: 1475 - protein, 11 aa, Metschnikowia sp.
  REGION 1..11: note = Amino acid sequence of SEQ ID NO:515
  source 1..11: note = JCM 33374
WHWVALGLGQP

SEQ ID NO: 1476 - protein, 12 aa, Metschnikowia sp.
  REGION 1..12: note = Amino acid sequence of SEQ ID NO:516
  source 1..12: note = JCM 33374
WHWVSLGLGQPM

SEQ ID NO: 1477 - protein, 11 aa, Metschnikowia sp.
  REGION 1..11: note = Amino acid sequence of SEQ ID NO:517
  source 1..11: note = JCM 33374
WHWVSLGLGQP

SEQ ID NO: 1478 - protein, 13 aa, Saccharomyces cerevisiae
  REGION 1..13: note = Amino acid sequence of SEQ ID NO:518
WHWLNLRPGQPMY

SEQ ID NO: 1479 - protein, 13 aa, Saccharomyces cerevisiae
  REGION 1..13: note = Amino acid sequence of SEQ ID NO:519
WHWLQLKPGQPMY

SEQ ID NO: 1480 - protein, 13 aa, Saccharomyces cerevisiae
  REGION 1..13: note = Amino acid sequence of SEQ ID NO:520
WHWLNLRPGQPMY

SEQ ID NO: 1481 - protein, 13 aa, Saccharomyces cerevisiae
  REGION 1..13: note = Amino acid sequence of SEQ ID NO:521
WHWLQLKPGQPMY

SEQ ID NO: 1482 - protein, 13 aa, Saccharomyces cerevisiae
  REGION 1..13: note = Amino acid sequence of SEQ ID NO:522
WHWLNLRPGQPMY

SEQ ID NO: 1483 - protein, 13 aa, Saccharomyces cerevisiae
  REGION 1..13: note = Amino acid sequence of SEQ ID NO:523
WHWLQLKPGQPMY

SEQ ID NO: 1484 - protein, 9 aa, Monilinia fructicola
  REGION 1..9: note = Amino acid sequence of SEQ ID NO:524
WCGRPGQGC

SEQ ID NO: 1485 - protein, 10 aa, Monilinia fructicola
  REGION 1..10: note = Amino acid sequence of SEQ ID NO:525
WCGRPGQGCK

SEQ ID NO: 1486 - protein, 10 aa, Monilinia laxa
  REGION 1..10: note = Amino acid sequence of SEQ ID NO:526
WCGRPGQGCK

SEQ ID NO: 1487 - protein, 9 aa, Monilinia laxa
  REGION 1..9: note = Amino acid sequence of SEQ ID NO:527
WCGRPGQGC

SEQ ID NO: 1488 - protein, 10 aa, Colletotrichum fructicola
  REGION 1..10: note = Amino acid sequence of SEQ ID NO:528
WCTKPGQPCW

SEQ ID NO: 1489 - protein, 10 aa, Colletotrichum asianum
  REGION 1..10: note = Amino acid sequence of SEQ ID NO:529
WCTEPGQPCW

SEQ ID NO: 1490 - protein, 10 aa, Colletotrichum asianum
  REGION 1..10: note = Amino acid sequence of SEQ ID NO:530
WCTKPGQPCW

SEQ ID NO: 1491 - protein, 10 aa, Colletotrichum asianum
  REGION 1..10: note = Amino acid sequence of SEQ ID NO:531
WCTQPGQPCW

SEQ ID NO: 1492 - protein, 10 aa, Fusarium pseudograminearum
  REGION 1..10: note = Amino acid sequence of SEQ ID NO:532
WCWWKGQPCW

SEQ ID NO: 1493 - protein, 10 aa, Fusarium pseudograminearum
  REGION 1..10: note = Amino acid sequence of SEQ ID NO:533
WCTWKGQPCW

SEQ ID NO: 1494 - protein, 10 aa, Beauveria bassiana
  REGION 1..10: note = Amino acid sequence of SEQ ID NO:534
WCMRPGQPCW

SEQ ID NO: 1495 - protein, 13 aa, Saccharomyces cerevisiae
  REGION 1..13: note = Amino acid sequence of SEQ ID NO:535
WHWLQLKPGQPMY

SEQ ID NO: 1496 - protein, 13 aa, Saccharomyces cerevisiae
  REGION 1..13: note = Amino acid sequence of SEQ ID NO:536
WHWLNLRPGQPMY

SEQ ID NO: 1497 - protein, 13 aa, Saccharomyces cerevisiae
  REGION 1..13: note = Amino acid sequence of SEQ ID NO:537
WHWLQLKPGQPMY

SEQ ID NO: 1498 - protein, 13 aa, Saccharomyces cerevisiae
  REGION 1..13: note = Amino acid sequence of SEQ ID NO:538
WHWLNLRPGQPMY

SEQ ID NO: 1499 - protein, 13 aa, Saccharomyces cerevisiae
  REGION 1..13: note = Amino acid sequence of SEQ ID NO:539
WHWLQLKPGQPMY

SEQ ID NO: 1500 - protein, 13 aa, Saccharomyces cerevisiae
  REGION 1..13: note = Amino acid sequence of SEQ ID NO:540
WHWLQLKPGQPMY

SEQ ID NO: 1501 - protein, 10 aa, Verticillium dahliae
  REGION 1..10: note = Amino acid sequence of SEQ ID NO:541
PCPRPGQGCW

SEQ ID NO: 1502 - protein, 10 aa, Verticillium dahliae
  REGION 1..10: note = Amino acid sequence of SEQ ID NO:542
PCPRPGQGCW

SEQ ID NO: 1503 - protein, 10 aa, Colletotrichum gloeosporioides
  REGION 1..10: note = Amino acid sequence of SEQ ID NO:543
WCTKPGQPCW

SEQ ID NO: 1504 - protein, 11 aa, unidentified
  REGION 1..11: note = Amino acid sequence of SEQ ID NO:544 (from Candida)
WGWLRFMPGEP

SEQ ID NO: 1505 - protein, 11 aa, unidentified
  REGION 1..11: note = Amino acid sequence of SEQ ID NO:545 (from Candida)
WGWLRFMPGEP

SEQ ID NO: 1506 - protein, 13 aa, Saccharomyces cerevisiae
  REGION 1..13: note = Amino acid sequence of SEQ ID NO:546
WHWLQLKPGQPMY

SEQ ID NO: 1507 - protein, 13 aa, Saccharomyces cerevisiae
  REGION 1..13: note = Amino acid sequence of SEQ ID NO:547
WHWLNLRPGQPMY

SEQ ID NO: 1508 - protein, 13 aa, Saccharomyces cerevisiae
  REGION 1..13: note = Amino acid sequence of SEQ ID NO:548
WHWLQLKPGQPMY

SEQ ID NO: 1509 - protein, 10 aa, Fusarium beomiforme
  REGION 1..10: note = Amino acid sequence of SEQ ID NO:549
WCTWRGQPCW

SEQ ID NO: 1510 - protein, 10 aa, Fusarium beomiforme
  REGION 1..10: note = Amino acid sequence of SEQ ID NO:550
WCMWRGQPCW

SEQ ID NO: 1511 - protein, 10 aa, Fusarium beomiforme
  REGION 1..10: note = Amino acid sequence of SEQ ID NO:551
WCLWRGQPCW

SEQ ID NO: 1512 - protein, 10 aa, Colletotrichum fructicola
  REGION 1..10: note = Amino acid sequence of SEQ ID NO:552
WCTKPGQPCW

SEQ ID NO: 1513 - protein, 10 aa, Fusarium acutatum
  REGION 1..10: note = Amino acid sequence of SEQ ID NO:553
WCMWRGQPCW

SEQ ID NO: 1514 - protein, 10 aa, Fusarium acutatum
  REGION 1..10: note = Amino acid sequence of SEQ ID NO:554
WCTWRGQPCW

SEQ ID NO: 1515 - protein, 10 aa, Fusarium austroafricanum
  REGION 1..10: note = Amino acid sequence of SEQ ID NO:555
WCSWKGQPCW

SEQ ID NO: 1516 - protein, 10 aa, Fusarium albosuccineum
  REGION 1..10: note = Amino acid sequence of SEQ ID NO:556
WCIWPGQPCW

SEQ ID NO: 1517 - protein, 10 aa, Fusarium albosuccineum
  REGION 1..10: note = Amino acid sequence of SEQ ID NO:557
WCWWPGQPCW

SEQ ID NO: 1518 - protein, 8 aa, Fusarium albosuccineum
  REGION 1..8: note = Amino acid sequence of SEQ ID NO:558
WCWWPGQP

SEQ ID NO: 1519 - protein, 10 aa, Fusarium albosuccineum
  REGION 1..10: note = Amino acid sequence of SEQ ID NO:559
WCVWPGQPCW

SEQ ID NO: 1520 - protein, 10 aa, Colletotrichum fructicola
  REGION 1..10: note = Amino acid sequence of SEQ ID NO:560
  source 1..10: note = Nara gc5
WCTKPGQPCW

SEQ ID NO: 1521 - protein, 10 aa, Fusarium agapanthi
  REGION 1..10: note = Amino acid sequence of SEQ ID NO:561
WCTWRGQPCW

SEQ ID NO: 1522 - protein, 10 aa, Fusarium agapanthi
  REGION 1..10: note = Amino acid sequence of SEQ ID NO:562
WCMWRGQPCW

SEQ ID NO: 1523 - protein, 10 aa, Colletotrichum siamense
  REGION 1..10: note = Amino acid sequence of SEQ ID NO:563
WCTKPGQPCW

SEQ ID NO: 1524 - protein, 10 aa, Colletotrichum tropicale
  REGION 1..10: note = Amino acid sequence of SEQ ID NO:564
WCTKPGQPCW

SEQ ID NO: 1525 - protein, 10 aa, Colletotrichum siamense
  REGION 1..10: note = Amino acid sequence of SEQ ID NO:565
WCTKPGQPCW

SEQ ID NO: 1526 - protein, 10 aa, Colletotrichum siamense
  REGION 1..10: note = Amino acid sequence of SEQ ID NO:566
WCTKPGQPCW

SEQ ID NO: 1527 - protein, 10 aa, Colletotrichum siamense
  REGION 1..10: note = Amino acid sequence of SEQ ID NO:567
WCTKPGQPCW

SEQ ID NO: 1528 - protein, 10 aa, Colletotrichum fructicola
  REGION 1..10: note = Amino acid sequence of SEQ ID NO:568
WCTKPGQPCW

SEQ ID NO: 1529 - protein, 10 aa, Colletotrichum fructicola
  REGION 1..10: note = Amino acid sequence of SEQ ID NO:569
WCTKPGQPCW

SEQ ID NO: 1530 - protein, 10 aa, Colletotrichum viniferum
  REGION 1..10: note = Amino acid sequence of SEQ ID NO:570
WCTEPGQPCW

SEQ ID NO: 1531 - protein, 10 aa, Colletotrichum viniferum
  REGION 1..10: note = Amino acid sequence of SEQ ID NO:571
WCTKPGQPCW

SEQ ID NO: 1532 - protein, 10 aa, Colletotrichum fructicola
  REGION 1..10: note = Amino acid sequence of SEQ ID NO:572
WCTKPGQPCW

SEQ ID NO: 1533 - protein, 10 aa, Fusarium gaditjirri
  REGION 1..10: note = Amino acid sequence of SEQ ID NO:573
WCTWRGQPCW

SEQ ID NO: 1534 - protein, 10 aa, Fusarium gaditjirri
  REGION 1..10: note = Amino acid sequence of SEQ ID NO:574
WCLWRGQPCW

SEQ ID NO: 1535 - protein, 10 aa, Fusarium zealandicum
  REGION 1..10: note = Amino acid sequence of SEQ ID NO:575
WCTRPGQSCW

SEQ ID NO: 1536 - protein, 10 aa, Fusarium decemcellulare
  REGION 1..10: note = Amino acid sequence of SEQ ID NO:576
WCIWPGQPCW

SEQ ID NO: 1537 - protein, 10 aa, Fusarium decemcellulare
  REGION 1..10: note = Amino acid sequence of SEQ ID NO:577
WCVWPGQPCW

SEQ ID NO: 1538 - protein, 10 aa, Fusarium decemcellulare
  REGION 1..10: note = Amino acid sequence of SEQ ID NO:578
WCWWPGQPCW

SEQ ID NO: 1539 - protein, 10 aa, Fusarium heterosporum
  REGION 1..10: note = Amino acid sequence of SEQ ID NO:579
WCTMPGQPCW

SEQ ID NO: 1540 - protein, 10 aa, Metarhizium anisopliae
  REGION 1..10: note = Amino acid sequence of SEQ ID NO:580
WCGRPGQPCW

SEQ ID NO: 1541 - protein, 10 aa, Metarhizium anisopliae
  REGION 1..10: note = Amino acid sequence of SEQ ID NO:581
WCWRPGQPCW

SEQ ID NO: 1542 - protein, 10 aa, Fusarium anthophilum
  REGION 1..10: note = Amino acid sequence of SEQ ID NO:582
WCTWRGQPCW

SEQ ID NO: 1543 - protein, 10 aa, Fusarium anthophilum
  REGION 1..10: note = Amino acid sequence of SEQ ID NO:583
WCMWRGQPCW

SEQ ID NO: 1544 - protein, 10 aa, Fusarium austroamericanum
  REGION 1..10: note = Amino acid sequence of SEQ ID NO:584
WCTWKGQPCW

SEQ ID NO: 1545 - protein, 10 aa, Fusarium austroamericanum
  REGION 1..10: note = Amino acid sequence of SEQ ID NO:585
WCWWKGQPCW

SEQ ID NO: 1546 - protein, 10 aa, Fusarium oxysporum
  REGION 1..10: note = Amino acid sequence of SEQ ID NO:586
WCMWRGQPCW

SEQ ID NO: 1547 - protein, 10 aa, Fusarium oxysporum
  REGION 1..10: note = Amino acid sequence of SEQ ID NO:587
WCLWRGQPCW

SEQ ID NO: 1548 - protein, 10 aa, Fusarium oxysporum
  REGION 1..10: note = Amino acid sequence of SEQ ID NO:588
WCTWRGQPCW

SEQ ID NO: 1549 - protein, 10 aa, Colletotrichum fructicola
  REGION 1..10: note = Amino acid sequence of SEQ ID NO:589
WCTKPGQPCW

SEQ ID NO: 1550 - protein, 10 aa, Colletotrichum siamense
  REGION 1..10: note = Amino acid sequence of SEQ ID NO:590
WCTKPGQPCW

SEQ ID NO: 1551 - protein, 10 aa, Colletotrichum aenigma
  REGION 1..10: note = Amino acid sequence of SEQ ID NO:591
WCTKPGQPCW

SEQ ID NO: 1552 - protein, 10 aa, Fusarium phyllophilum
  REGION 1..10: note = Amino acid sequence of SEQ ID NO:592
WCTWRGQPCW

SEQ ID NO: 1553 - protein, 10 aa, Fusarium phyllophilum
  REGION 1..10: note = Amino acid sequence of SEQ ID NO:593
WCMWRGQPCW

SEQ ID NO: 1554 - protein, 10 aa, Fusarium mexicanum
  REGION 1..10: note = Amino acid sequence of SEQ ID NO:594
WCTWRGQPCW

SEQ ID NO: 1555 - protein, 10 aa, Fusarium mexicanum
  REGION 1..10: note = Amino acid sequence of SEQ ID NO:595
WCMWRGQPCW

SEQ ID NO: 1556 - protein, 10 aa, Fusarium napiforme
  REGION 1..10: note = Amino acid sequence of SEQ ID NO:596
WCMWRGQPCW

SEQ ID NO: 1557 - protein, 10 aa, Fusarium napiforme
  REGION 1..10: note = Amino acid sequence of SEQ ID NO:597
WCTWRGQPCW

SEQ ID NO: 1558 - protein, 10 aa, Fusarium pseudocircinatum
  REGION 1..10: note = Amino acid sequence of SEQ ID NO:598
WCTWRGQPCW

SEQ ID NO: 1559 - protein, 10 aa, Fusarium pseudocircinatum
  REGION 1..10: note = Amino acid sequence of SEQ ID NO:599
WCMWRGQPCW

SEQ ID NO: 1560 - protein, 10 aa, Fusarium pseudoanthophilum
  REGION 1..10: note = Amino acid sequence of SEQ ID NO:600
WCTWRGQPCW

SEQ ID NO: 1561 - protein, 10 aa, Fusarium pseudoanthophilum
  REGION 1..10: note = Amino acid sequence of SEQ ID NO:601
WCMWRGQPCW

SEQ ID NO: 1562 - protein, 10 aa, Fusarium subglutinans
  REGION 1..10: note = Amino acid sequence of SEQ ID NO:602
WCMWRGQPCW

SEQ ID NO: 1563 - protein, 10 aa, Fusarium subglutinans
  REGION 1..10: note = Amino acid sequence of SEQ ID NO:603
WCTWRGQPCW

SEQ ID NO: 1564 - protein, 10 aa, Fusarium sp.
  REGION 1..10: note = Amino acid sequence of SEQ ID NO:604
  source 1..10: note = NRRL 52700
WCTWPGQPCW

SEQ ID NO: 1565 - protein, 10 aa, Fusarium sp.
  REGION 1..10: note = Amino acid sequence of SEQ ID NO:605
  source 1..10: note = NRRL 52700
WCTWRGQPCW

SEQ ID NO: 1566 - protein, 10 aa, Fusarium sp.
  REGION 1..10: note = Amino acid sequence of SEQ ID NO:606
  source 1..10: note = NRRL 52700
WCMWRGQPCW

SEQ ID NO: 1567 - protein, 10 aa, Fusarium tjaetaba
  REGION 1..10: note = Amino acid sequence of SEQ ID NO:607
WCTWRGQPCW

SEQ ID NO: 1568 - protein, 10 aa, Fusarium tjaetaba
  REGION 1..10: note = Amino acid sequence of SEQ ID NO:608
WCMWRGQPCW

SEQ ID NO: 1569 - protein, 10 aa, Fusarium sp.
  REGION 1..10: note = Amino acid sequence of SEQ ID NO:609
  source 1..10: note = NRRL 25303
WCTWRGQPCW

SEQ ID NO: 1570 - protein, 10 aa, Fusarium sp.
  REGION 1..10: note = Amino acid sequence of SEQ ID NO:610
  source 1..10: note = NRRL 25303
WCMWRGQPCW

SEQ ID NO: 1571 - protein, 10 aa, Fusarium denticulatum
  REGION 1..10: note = Amino acid sequence of SEQ ID NO:611
WCMWRGQPCW

SEQ ID NO: 1572 - protein, 10 aa, Fusarium denticulatum
  REGION 1..10: note = Amino acid sequence of SEQ ID NO:612
WCTWRGQPCW

SEQ ID NO: 1573 - protein, 10 aa, Fusarium circinatum
  REGION 1..10: note = Amino acid sequence of SEQ ID NO:613
WCTWRGQPCW

SEQ ID NO: 1574 - protein, 10 aa, Fusarium circinatum
  REGION 1..10: note = Amino acid sequence of SEQ ID NO:614
WCMWRGQPCW

SEQ ID NO: 1575 - protein, 10 aa, Fusarium globosum
  REGION 1..10: note = Amino acid sequence of SEQ ID NO:615
WCTWRGQPCW

SEQ ID NO: 1576 - protein, 10 aa, Fusarium globosum
  REGION 1..10: note = Amino acid sequence of SEQ ID NO:616
WCMWRGQPCW

SEQ ID NO: 1577 - protein, 10 aa, Fusarium mundagurra
  REGION 1..10: note = Amino acid sequence of SEQ ID NO:617
WCTWRGQPCW

SEQ ID NO: 1578 - protein, 10 aa, Fusarium mundagurra
  REGION 1..10: note = Amino acid sequence of SEQ ID NO:618
WCMWRGQPCW

SEQ ID NO: 1579 - protein, 10 aa, Botrytis fragariae
  REGION 1..10: note = Amino acid sequence of SEQ ID NO:619
WCGRPGQPCK

SEQ ID NO: 1580 - protein, 9 aa, Botrytis fragariae
  REGION 1..9: note = Amino acid sequence of SEQ ID NO:620
WCGRPGQPC

SEQ ID NO: 1581 - protein, 10 aa, Fusarium coicis
  REGION 1..10: note = Amino acid sequence of SEQ ID NO:621
WCTWRGQPCW

SEQ ID NO: 1582 - protein, 10 aa, Fusarium coicis
  REGION 1..10: note = Amino acid sequence of SEQ ID NO:622
WCMWRGQPCW

SEQ ID NO: 1583 - protein, 10 aa, Fusarium bulbicola
  REGION 1..10: note = Amino acid sequence of SEQ ID NO:623
WCTWRGQPCW

SEQ ID NO: 1584 - protein, 10 aa, Fusarium bulbicola
  REGION 1..10: note = Amino acid sequence of SEQ ID NO:624
WCMWRGQPCW

SEQ ID NO: 1585 - protein, 10 aa, Fusarium oxysporum
  REGION 1..10: note = Amino acid sequence of SEQ ID NO:625
  source 1..10: note = f. sp. conglutinans
WCLWRGQPCW

SEQ ID NO: 1586 - protein, 10 aa, Fusarium oxysporum
  REGION 1..10: note = Amino acid sequence of SEQ ID NO:626
  source 1..10: note = f. sp. conglutinans
WCTWRGQPCW

SEQ ID NO: 1587 - protein, 10 aa, Fusarium oxysporum
  REGION 1..10: note = Amino acid sequence of SEQ ID NO:627
  source 1..10: note = f. sp. conglutinans
WCMWRGQPCW

SEQ ID NO: 1588 - protein, 10 aa, Ustilaginoidea virens
  REGION 1..10: note = Amino acid sequence of SEQ ID NO:628
WCDRPGQPCW

SEQ ID NO: 1589 - protein, 10 aa, Ustilaginoidea virens
  REGION 1..10: note = Amino acid sequence of SEQ ID NO:629
WCWRPGEPCW

SEQ ID NO: 1590 - protein, 10 aa, Ustilaginoidea virens
  REGION 1..10: note = Amino acid sequence of SEQ ID NO:630
WCWRPGQPCW

SEQ ID NO: 1591 - protein, 10 aa, Stachybotrys chartarum
  REGION 1..10: note = Amino acid sequence of SEQ ID NO:631
WCTRPGQPCW

SEQ ID NO: 1592 - protein, 10 aa, Stachybotrys chartarum
  REGION 1..10: note = Amino acid sequence of SEQ ID NO:632
WCVRPGQPCW

SEQ ID NO: 1593 - protein, 10 aa, Stachybotrys chartarum
  REGION 1..10: note = Amino acid sequence of SEQ ID NO:633
WCTRPGQPCW

SEQ ID NO: 1594 - protein, 10 aa, Stachybotrys chartarum
  REGION 1..10: note = Amino acid sequence of SEQ ID NO:634
WCVRPGQPCW

SEQ ID NO: 1595 - protein, 10 aa, Stachybotrys chlorohalonata
  REGION 1..10: note = Amino acid sequence of SEQ ID NO:635
WCTRPGQPCW

SEQ ID NO: 1596 - protein, 10 aa, Stachybotrys chlorohalonata
  REGION 1..10: note = Amino acid sequence of SEQ ID NO:636
WCVRPGQPCW

SEQ ID NO: 1597 - protein, 10 aa, Stachybotrys chartarum
  REGION 1..10: note = Amino acid sequence of SEQ ID NO:637
WCTRPGQPCW

SEQ ID NO: 1598 - protein, 10 aa, Stachybotrys chartarum
  REGION 1..10: note = Amino acid sequence of SEQ ID NO:638
WCVRPGQPCW

SEQ ID NO: 1599 - protein, 10 aa, Metarhizium anisopliae
  REGION 1..10: note = Amino acid sequence of SEQ ID NO:639
WCWQPGQPCW

SEQ ID NO: 1600 - protein, 10 aa, Metarhizium anisopliae
  REGION 1..10: note = Amino acid sequence of SEQ ID NO:640
WCWRPGQPCW

SEQ ID NO: 1601 - protein, 10 aa, Metarhizium anisopliae
  REGION 1..10: note = Amino acid sequence of SEQ ID NO:641
WCWAPGQPCW

SEQ ID NO: 1602 - protein, 9 aa, Pseudogymnoascus sp.
  REGION 1..9: note = Amino acid sequence of SEQ ID NO:642
  source 1..9: note = VKM F-3557
CWRPGQPCG

SEQ ID NO: 1603 - protein, 9 aa, Pseudogymnoascus sp.
  REGION 1..9: note = Amino acid sequence of SEQ ID NO:643
  source 1..9: note = VKM F-3775
CWRPGQPCG

SEQ ID NO: 1604 - protein, 9 aa, Pseudogymnoascus sp.
  REGION 1..9: note = Amino acid sequence of SEQ ID NO:644
  source 1..9: note = VKM F-4514 (FW-929)
CWRPGQPCG

SEQ ID NO: 1605 - protein, 9 aa, Pseudogymnoascus sp.
  REGION 1..9: note = Amino acid sequence of SEQ ID NO:645
  source 1..9: note = VKM F-4516 (FW-969)
CWRPGQPCG

SEQ ID NO: 1606 - protein, 9 aa, Pseudogymnoascus sp.
  REGION 1..9: note = Amino acid sequence of SEQ ID NO:646
  source 1..9: note = VKM F-4515 (FW-2607)
CWRPGQPCG

SEQ ID NO: 1607 - protein, 9 aa, Pseudogymnoascus sp.
  REGION 1..9: note = Amino acid sequence of SEQ ID NO:647
  source 1..9: note = VKM F-103
CWRPGQPCG

SEQ ID NO: 1608 - protein, 9 aa, Pseudogymnoascus sp.
  REGION 1..9: note = Amino acid sequence of SEQ ID NO:648
  source 1..9: note = VKM F-4517 (FW-2822)
CWRPGQPCG

SEQ ID NO: 1609 - protein, 9 aa, Pseudogymnoascus sp.
  REGION 1..9: note = Amino acid sequence of SEQ ID NO:649
  source 1..9: note = VKM F-4518 (FW-2643)
CWRPGQPCG

SEQ ID NO: 1610 - protein, 9 aa, Pseudogymnoascus sp.
  REGION 1..9: note = Amino acid sequence of SEQ ID NO:650
  source 1..9: note = VKM F-4519 (FW-2642)
CWRPGQPCG

SEQ ID NO: 1611 - protein, 9 aa, Pseudogymnoascus sp.
  REGION 1..9: note = Amino acid sequence of SEQ ID NO:651
  source 1..9: note = VKM F-4520 (FW-2644)
CWRPGQPCG

SEQ ID NO: 1612 - protein, 10 aa, Beauveria bassiana
  REGION 1..10: note = Amino acid sequence of SEQ ID NO:652
WCMRPGQPCW

SEQ ID NO: 1613 - protein, 10 aa, Metarhizium album
  REGION 1..10: note = Amino acid sequence of SEQ ID NO:653
WCWRPGEPCW

SEQ ID NO: 1614 - protein, 10 aa, Metarhizium album
  REGION 1..10: note = Amino acid sequence of SEQ ID NO:654
WCWRPGMPCW

SEQ ID NO: 1615 - protein, 10 aa, Metarhizium anisopliae
  REGION 1..10: note = Amino acid sequence of SEQ ID NO:655
WCWQPGQPCW

SEQ ID NO: 1616 - protein, 10 aa, Metarhizium anisopliae
  REGION 1..10: note = Amino acid sequence of SEQ ID NO:656
WCWRPGQPCW

SEQ ID NO: 1617 - protein, 10 aa, Metarhizium anisopliae
  REGION 1..10: note = Amino acid sequence of SEQ ID NO:657
WCWAPGQPCW

SEQ ID NO: 1618 - protein, 10 aa, Metarhizium brunneum
  REGION 1..10: note = Amino acid sequence of SEQ ID NO:658
WCGRPGQPCW

SEQ ID NO: 1619 - protein, 10 aa, Metarhizium brunneum
  REGION 1..10: note = Amino acid sequence of SEQ ID NO:659
WCWRPGQPCW

SEQ ID NO: 1620 - protein, 10 aa, Metarhizium guizhouense
  REGION 1..10: note = Amino acid sequence of SEQ ID NO:660
WCGAPGQPCW

SEQ ID NO: 1621 - protein, 10 aa, Metarhizium guizhouense
  REGION 1..10: note = Amino acid sequence of SEQ ID NO:661
WCWQPGQPCW

SEQ ID NO: 1622 - protein, 10 aa, Metarhizium guizhouense
  REGION 1..10: note = Amino acid sequence of SEQ ID NO:662
WCWRPGQPCW

SEQ ID NO: 1623 - protein, 10 aa, Metarhizium majus
  REGION 1..10: note = Amino acid sequence of SEQ ID NO:663
WCGAPGQPCW

SEQ ID NO: 1624 - protein, 10 aa, Metarhizium majus
  REGION 1..10: note = Amino acid sequence of SEQ ID NO:664
WCWQPGQPCW

SEQ ID NO: 1625 - protein, 10 aa, Metarhizium majus
  REGION 1..10: note = Amino acid sequence of SEQ ID NO:665
WCWRPGQPCW

SEQ ID NO: 1626 - protein, 10 aa, Metarhizium anisopliae
  REGION 1..10: note = Amino acid sequence of SEQ ID NO:666
WCWRPGQPCW

SEQ ID NO: 1627 - protein, 10 aa, Metarhizium anisopliae
  REGION 1..10: note = Amino acid sequence of SEQ ID NO:667
WCWAPGQPCW

SEQ ID NO: 1628 - protein, 10 aa, Metarhizium anisopliae
  REGION 1..10: note = Amino acid sequence of SEQ ID NO:668
WCWRPGQPCW

SEQ ID NO: 1629 - protein, 10 aa, Metarhizium anisopliae
  REGION 1..10: note = Amino acid sequence of SEQ ID NO:669
WCWAPGQPCW

SEQ ID NO: 1630 - protein, 10 aa, Diaporthe ampelina
  REGION 1..10: note = Amino acid sequence of SEQ ID NO:670
WCFWKGQGCW

SEQ ID NO: 1631 - protein, 10 aa, Fusarium fujikuroi
  REGION 1..10: note = Amino acid sequence of SEQ ID NO:671
WCMWRGQPCW

SEQ ID NO: 1632 - protein, 10 aa, Fusarium fujikuroi
  REGION 1..10: note = Amino acid sequence of SEQ ID NO:672
WCTWRGQPCW

SEQ ID NO: 1633 - protein, 10 aa, Fusarium fujikuroi
  REGION 1..10: note = Amino acid sequence of SEQ ID NO:673
WCTWRGQPCW

SEQ ID NO: 1634 - protein, 10 aa, Fusarium fujikuroi
  REGION 1..10: note = Amino acid sequence of SEQ ID NO:674
WCMWRGQPCW

SEQ ID NO: 1635 - protein, 10 aa, Fusarium fujikuroi
  REGION 1..10: note = Amino acid sequence of SEQ ID NO:675
WCTWRGQPCW

SEQ ID NO: 1636 - protein, 10 aa, Fusarium oxysporum
  REGION 1..10: note = Amino acid sequence of SEQ ID NO:676
WCLWRGQPCW

SEQ ID NO: 1637 - protein, 10 aa, Fusarium oxysporum
  REGION 1..10: note = Amino acid sequence of SEQ ID NO:677
WCTWRGQPCW

SEQ ID NO: 1638 - protein, 10 aa, Fusarium oxysporum
  REGION 1..10: note = Amino acid sequence of SEQ ID NO:678
WCMWRGQPCW

SEQ ID NO: 1639 - protein, 11 aa, unidentified
  REGION 1..11: note = Amino acid sequence of SEQ ID NO:679 (from Candida)
WGWLRFYPGEP

SEQ ID NO: 1640 - protein, 11 aa, unidentified
  REGION 1..11: note = Amino acid sequence of SEQ ID NO:680 (from Candida)
WGWLRFFPGEP

SEQ ID NO: 1641 - protein, 13 aa, Saccharomyces eubayanus
  REGION 1..13: note = Amino acid sequence of SEQ ID NO:681
WHWLKLRPGQPMY

SEQ ID NO: 1642 - protein, 13 aa, Saccharomyces eubayanus
  REGION 1..13: note = Amino acid sequence of SEQ ID NO:682
WHWLTLRPGQPMY

SEQ ID NO: 1643 - protein, 13 aa, Saccharomyces eubayanus
  REGION 1..13: note = Amino acid sequence of SEQ ID NO:683
WHWLKLRPGQPMY

SEQ ID NO: 1644 - protein, 13 aa, Saccharomyces eubayanus
  REGION 1..13: note = Amino acid sequence of SEQ ID NO:684
WHWLQLRPGQPMY

SEQ ID NO: 1645 - protein, 13 aa, Saccharomyces sp.
  REGION 1..13: note = Amino acid sequence of SEQ ID NO:685
  source 1..13: note = 'boulardii'
WHWLQLKPGQPMY

SEQ ID NO: 1646 - protein, 13 aa, Saccharomyces sp.
  REGION 1..13: note = Amino acid sequence of SEQ ID NO:686
  source 1..13: note = 'boulardii'
WHWLNLRPGQPMY

SEQ ID NO: 1647 - protein, 13 aa, Saccharomyces sp.
  REGION 1..13: note = Amino acid sequence of SEQ ID NO:687
  source 1..13: note = 'boulardii'
WHWLQLKPGQPMY

SEQ ID NO: 1648 - protein, 10 aa, Escovopsis weberi
  REGION 1..10: note = Amino acid sequence of SEQ ID NO:688
WCTNPGQGCW

SEQ ID NO: 1649 - protein, 10 aa, Fusarium langsethiae
  REGION 1..10: note = Amino acid sequence of SEQ ID NO:689
WCTWKGQPCW

SEQ ID NO: 1650 - protein, 10 aa, Fusarium langsethiae
  REGION 1..10: note = Amino acid sequence of SEQ ID NO:690
WCWWKGQPCW

SEQ ID NO: 1651 - protein, 13 aa, Saccharomyces sp.
  REGION 1..13: note = Amino acid sequence of SEQ ID NO:691
  source 1..13: note = 'boulardii'
WHWLQLKPGQPMY

SEQ ID NO: 1652 - protein, 13 aa, Saccharomyces sp.
  REGION 1..13: note = Amino acid sequence of SEQ ID NO:692
  source 1..13: note = 'boulardii'
WHWLNLRPGQPMY

SEQ ID NO: 1653 - protein, 13 aa, Saccharomyces sp.
  REGION 1..13: note = Amino acid sequence of SEQ ID NO:693
  source 1..13: note = 'boulardii'
WHWLQLKPGQPMY

SEQ ID NO: 1654 - protein, 10 aa, Drechmeria coniospora
  REGION 1..10: note = Amino acid sequence of SEQ ID NO:694
WCTRPGSGCW

SEQ ID NO: 1655 - protein, 13 aa, Saccharomyces cerevisiae
  REGION 1..13: note = Amino acid sequence of SEQ ID NO:695
WHWLQLKPGQPMY

SEQ ID NO: 1656 - protein, 13 aa, Saccharomyces cerevisiae
  REGION 1..13: note = Amino acid sequence of SEQ ID NO:696
WHWLNLRPGQPMY

SEQ ID NO: 1657 - protein, 13 aa, Saccharomyces cerevisiae
  REGION 1..13: note = Amino acid sequence of SEQ ID NO:697
WHWLQLKPGQPMY

SEQ ID NO: 1658 - protein, 10 aa, Metarhizium rileyi
  REGION 1..10: note = Amino acid sequence of SEQ ID NO:698
WCWRPGQPCW

SEQ ID NO: 1659 - protein, 9 aa, Pseudogymnoascus destructans
  REGION 1..9: note = Amino acid sequence of SEQ ID NO:699
CWRPGQPCG

SEQ ID NO: 1660 - protein, 9 aa, Pochonia chlamydosporia
  REGION 1..9: note = Amino acid sequence of SEQ ID NO:700
  source 1..9: note = 170
WCWRPGEPC

SEQ ID NO: 1661 - protein, 10 aa, Pochonia chlamydosporia
  REGION 1..10: note = Amino acid sequence of SEQ ID NO:701
  source 1..10: note = 170
WCWRPGQSCW

SEQ ID NO: 1662 - protein, 10 aa, Pochonia chlamydosporia
  REGION 1..10: note = Amino acid sequence of SEQ ID NO:702
  source 1..10: note = 170
WCWRPGQPCW

SEQ ID NO: 1663 - protein, 10 aa, Purpureocillium lilacinum
  REGION 1..10: note = Amino acid sequence of SEQ ID NO:703
WCTRPGQPCK

SEQ ID NO: 1664 - protein, 10 aa, Purpureocillium lilacinum
  REGION 1..10: note = Amino acid sequence of SEQ ID NO:704
WCTRRGQPCK

SEQ ID NO: 1665 - protein, 10 aa, Purpureocillium lilacinum
  REGION 1..10: note = Amino acid sequence of SEQ ID NO:705
WCTRPGQPCK

SEQ ID NO: 1666 - protein, 10 aa, Purpureocillium lilacinum
  REGION 1..10: note = Amino acid sequence of SEQ ID NO:706
WCTRRGQPCK

SEQ ID NO: 1667 - protein, 11 aa, Metschnikowia bicuspidata
  REGION 1..11: note = Amino acid sequence of SEQ ID NO:707
  source 1..11: note = var. bicuspidata NRRL YB-4993
WHWVRLKIGQP

SEQ ID NO: 1668 - protein, 11 aa, Metschnikowia bicuspidata
  REGION 1..11: note = Amino acid sequence of SEQ ID NO:708
  source 1..11: note = var. bicuspidata NRRL YB-4993
WHWVALKIGQP

SEQ ID NO: 1669 - protein, 13 aa, Metschnikowia bicuspidata
  REGION 1..13: note = Amino acid sequence of SEQ ID NO:709
  source 1..13: note = var. bicuspidata NRRL YB-4993
WHWVALKIGQPFF

SEQ ID NO: 1670 - protein, 11 aa, Metschnikowia bicuspidata
  REGION 1..11: note = Amino acid sequence of SEQ ID NO:710
  source 1..11: note = var. bicuspidata NRRL YB-4993
WHWVALKIGQP

SEQ ID NO: 1671 - protein, 10 aa, Fusarium poae
  REGION 1..10: note = Amino acid sequence of SEQ ID NO:711
WCTWKGQPCW

SEQ ID NO: 1672 - protein, 10 aa, Fusarium poae
  REGION 1..10: note = Amino acid sequence of SEQ ID NO:712
WCWWKGQPCW

SEQ ID NO: 1673 - protein, 9 aa, Pseudogymnoascus sp.
  REGION 1..9: note = Amino acid sequence of SEQ ID NO:713
  source 1..9: note = WSF 3629
CWRPGQPCG

SEQ ID NO: 1674 - protein, 9 aa, Pseudogymnoascus sp.
  REGION 1..9: note = Amino acid sequence of SEQ ID NO:714
  source 1..9: note = 24MN13
CWRPGQPCG

SEQ ID NO: 1675 - protein, 9 aa, Pseudogymnoascus sp.
  REGION 1..9: note = Amino acid sequence of SEQ ID NO:715
  source 1..9: note = 23342-1-I1
CWRPGQPCG

SEQ ID NO: 1676 - protein, 9 aa, Pseudogymnoascus sp.
  REGION 1..9: note = Amino acid sequence of SEQ ID NO:716
  source 1..9: note = 05NY08
CWRPGQPCG

SEQ ID NO: 1677 - protein, 9 aa, Pseudogymnoascus sp.
  REGION 1..9: note = Amino acid sequence of SEQ ID NO:717
  source 1..9: note = 03VT05
CWRPGQPCG

SEQ ID NO: 1678 - protein, 9 aa, Pseudogymnoascus verrucosus
  REGION 1..9: note = Amino acid sequence of SEQ ID NO:718
CWRPGQPCG

SEQ ID NO: 1679 - protein, 10 aa, Drechmeria coniospora
  REGION 1..10: note = Amino acid sequence of SEQ ID NO:719
WCTRPGSGCW

SEQ ID NO: 1680 - protein, 13 aa, Hanseniaspora osmophila
  REGION 1..13: note = Amino acid sequence of SEQ ID NO:720
WHWLKFDVGEPLY

SEQ ID NO: 1681 - protein, 13 aa, Hanseniaspora osmophila
  REGION 1..13: note = Amino acid sequence of SEQ ID NO:721
WHWLKFDVGEPLY

SEQ ID NO: 1682 - protein, 9 aa, Penicilliopsis zonata
  REGION 1..9: note = Amino acid sequence of SEQ ID NO:722
  source 1..9: note = CBS 506.65
WCWQPGQGC

SEQ ID NO: 1683 - protein, 13 aa, Saccharomyces cerevisiae
  REGION 1..13: note = Amino acid sequence of SEQ ID NO:723
WHWLNLRPGQPMY

SEQ ID NO: 1684 - protein, 13 aa, Saccharomyces cerevisiae
  REGION 1..13: note = Amino acid sequence of SEQ ID NO:724
WHWLQLKPGQPMY

SEQ ID NO: 1685 - protein, 13 aa, Saccharomyces cerevisiae
  REGION 1..13: note = Amino acid sequence of SEQ ID NO:725
WHWLQLKPGQPMY

SEQ ID NO: 1686 - protein, 10 aa, Fusarium graminearum
  REGION 1..10: note = Amino acid sequence of SEQ ID NO:726
WCTWKGQPCW

SEQ ID NO: 1687 - protein, 10 aa, Fusarium graminearum
  REGION 1..10: note = Amino acid sequence of SEQ ID NO:727
WCWWKGQPCW

SEQ ID NO: 1688 - protein, 10 aa, Fusarium oxysporum
  REGION 1..10: note = Amino acid sequence of SEQ ID NO:728
  source 1..10: note = f. sp. radicis-cucumerinum
WCLWRGQPCW

SEQ ID NO: 1689 - protein, 10 aa, Fusarium oxysporum
  REGION 1..10: note = Amino acid sequence of SEQ ID NO:729
  source 1..10: note = f. sp. radicis-cucumerinum
WCTWRGQPCW

SEQ ID NO: 1690 - protein, 10 aa, Fusarium oxysporum
  REGION 1..10: note = Amino acid sequence of SEQ ID NO:730
  source 1..10: note = f. sp. radicis-cucumerinum
WCMWRGQPCW

SEQ ID NO: 1691 - protein, 11 aa, unidentified
  REGION 1..11: note = Amino acid sequence of SEQ ID NO:731 (from Candida)
WGWLRFYPGEP

SEQ ID NO: 1692 - protein, 11 aa, unidentified
  REGION 1..11: note = Amino acid sequence of SEQ ID NO:732 (from Candida)
WGWLRFFPGEP

SEQ ID NO: 1693 - protein, 11 aa, unidentified
  REGION 1..11: note = Amino acid sequence of SEQ ID NO:733 (from Candida)
WGWLRFYPGEP

SEQ ID NO: 1694 - protein, 11 aa, unidentified
  REGION 1..11: note = Amino acid sequence of SEQ ID NO:734 (from Candida)
WGWLRFFPGEP

SEQ ID NO: 1695 - protein, 13 aa, Saccharomyces cerevisiae
  REGION 1..13: note = Amino acid sequence of SEQ ID NO:735
WHWLNLRPGQPMY

SEQ ID NO: 1696 - protein, 13 aa, Saccharomyces cerevisiae
  REGION 1..13: note = Amino acid sequence of SEQ ID NO:736
WHWLQLKPGQPMY

SEQ ID NO: 1697 - protein, 13 aa, Saccharomyces cerevisiae
  REGION 1..13: note = Amino acid sequence of SEQ ID NO:737
WHWLQLKPGQPMY

SEQ ID NO: 1698 - protein, 10 aa, Beauveria bassiana
  REGION 1..10: note = Amino acid sequence of SEQ ID NO:738
WCMRPGQPCW

SEQ ID NO: 1699 - protein, 10 aa, Verticillium dahliae
  REGION 1..10: note = Amino acid sequence of SEQ ID NO:739
PCPRPGQGCW

SEQ ID NO: 1700 - protein, 10 aa, Verticillium dahliae
  REGION 1..10: note = Amino acid sequence of SEQ ID NO:740
PCPRPGQGCW

SEQ ID NO: 1701 - protein, 10 aa, Verticillium dahliae
  REGION 1..10: note = Amino acid sequence of SEQ ID NO:741
PCPRPGQGCW

SEQ ID NO: 1702 - protein, 10 aa, Verticillium dahliae
  REGION 1..10: note = Amino acid sequence of SEQ ID NO:742
PCPRPGQGCW

SEQ ID NO: 1703 - protein, 10 aa, Verticillium dahliae
  REGION 1..10: note = Amino acid sequence of SEQ ID NO:743
PCPRPGQGCW

SEQ ID NO: 1704 - protein, 10 aa, Fusarium nygamai
  REGION 1..10: note = Amino acid sequence of SEQ ID NO:744
WCTWRGQPCW

SEQ ID NO: 1705 - protein, 10 aa, Fusarium nygamai
  REGION 1..10: note = Amino acid sequence of SEQ ID NO:745
WCMWRGQPCW

SEQ ID NO: 1706 - protein, 9 aa, Rutstroemia sp.
  REGION 1..9: note = Amino acid sequence of SEQ ID NO:746
  source 1..9: note = NJR-2017a BVV2
WCGRPGQPC

SEQ ID NO: 1707 - protein, 10 aa, Rutstroemia sp.
  REGION 1..10: note = Amino acid sequence of SEQ ID NO:747
  source 1..10: note = NJR-2017a BVV2
WCGRPGQPCK

SEQ ID NO: 1708 - protein, 10 aa, Rutstroemia sp.
  REGION 1..10: note = Amino acid sequence of SEQ ID NO:748
  source 1..10: note = NJR-2017a BBW
WCGRPGQPCK

SEQ ID NO: 1709 - protein, 9 aa, Rutstroemia sp.
  REGION 1..9: note = Amino acid sequence of SEQ ID NO:749
  source 1..9: note = NJR-2017a BBW
WCGRPGQPC

SEQ ID NO: 1710 - protein, 9 aa, Rutstroemia sp.
  REGION 1..9: note = Amino acid sequence of SEQ ID NO:750
  source 1..9: note = NJR-2017a WRK4
WCGRPGQPC

SEQ ID NO: 1711 - protein, 10 aa, Rutstroemia sp.
  REGION 1..10: note = Amino acid sequence of SEQ ID NO:751
  source 1..10: note = NJR-2017a WRK4
WCGRPGQPCK

SEQ ID NO: 1712 - protein, 11 aa, unidentified
  REGION 1..11: note = Amino acid sequence of SEQ ID NO:752 (from Candida)
WGWLRFMPGEP

SEQ ID NO: 1713 - protein, 11 aa, unidentified
  REGION 1..11: note = Amino acid sequence of SEQ ID NO:753 (from Candida)
WGWLRFYPGEP

SEQ ID NO: 1714 - protein, 10 aa, unidentified
  REGION 1..10: note = Amino acid sequence of SEQ ID NO:754 (from Candida)
WGWLRFFPGE

SEQ ID NO: 1715 - protein, 11 aa, unidentified
  REGION 1..11: note = Amino acid sequence of SEQ ID NO:755 (from Candida)
WGWLRFFPGEP

SEQ ID NO: 1716 - protein, 10 aa, Fusarium culmorum
  REGION 1..10: note = Amino acid sequence of SEQ ID NO:756
WCWWKGQPCW

SEQ ID NO: 1717 - protein, 10 aa, Fusarium culmorum
  REGION 1..10: note = Amino acid sequence of SEQ ID NO:757
WCTWKGQPCW

SEQ ID NO: 1718 - protein, 13 aa, Saccharomyces cerevisiae
  REGION 1..13: note = Amino acid sequence of SEQ ID NO:758
WHWLNLRPGQPMY

SEQ ID NO: 1719 - protein, 13 aa, Saccharomyces cerevisiae
  REGION 1..13: note = Amino acid sequence of SEQ ID NO:759
WHWLQLKPGQPMY

SEQ ID NO: 1720 - protein, 13 aa, Saccharomyces cerevisiae
  REGION 1..13: note = Amino acid sequence of SEQ ID NO:760
WHWLNLRPGQPMY

SEQ ID NO: 1721 - protein, 13 aa, Saccharomyces cerevisiae
  REGION 1..13: note = Amino acid sequence of SEQ ID NO:761
WHWLQLKPGQPMY

SEQ ID NO: 1722 - protein, 13 aa, Saccharomyces cerevisiae
  REGION 1..13: note = Amino acid sequence of SEQ ID NO:762
WHWLQLKPGQPMY

SEQ ID NO: 1723 - protein, 13 aa, Saccharomyces cerevisiae
  REGION 1..13: note = Amino acid sequence of SEQ ID NO:763
WHWLQLKPGQPMY

SEQ ID NO: 1724 - protein, 13 aa, Saccharomyces cerevisiae
  REGION 1..13: note = Amino acid sequence of SEQ ID NO:764
WHWLNLRPGQPMY

SEQ ID NO: 1725 - protein, 13 aa, Saccharomyces cerevisiae
  REGION 1..13: note = Amino acid sequence of SEQ ID NO:765
WHWLQLKPGQPMY

SEQ ID NO: 1726 - protein, 13 aa, Saccharomyces cerevisiae
  REGION 1..13: note = Amino acid sequence of SEQ ID NO:766
WHWLQLKPGQPMY

SEQ ID NO: 1727 - protein, 11 aa, unidentified
  REGION 1..11: note = Amino acid sequence of SEQ ID NO:767 (from Candida)
WGWLRFMPGEP

SEQ ID NO: 1728 - protein, 11 aa, unidentified
  REGION 1..11: note = Amino acid sequence of SEQ ID NO:768 (from Candida)
WGWLRFMPGEP

SEQ ID NO: 1729 - protein, 10 aa, Purpureocillium lilacinum
  REGION 1..10: note = Amino acid sequence of SEQ ID NO:769
WCTRPGQPCK

SEQ ID NO: 1730 - protein, 10 aa, Purpureocillium lilacinum
  REGION 1..10: note = Amino acid sequence of SEQ ID NO:770
WCTRRGQPCK

SEQ ID NO: 1731 - protein, 12 aa, Metschnikowia aff. pulcherrima
  REGION 1..12: note = Amino acid sequence of SEQ ID NO:771
WHWGRLRMGQPV

SEQ ID NO: 1732 - protein, 13 aa, Metschnikowia aff. pulcherrima
  REGION 1..13: note = Amino acid sequence of SEQ ID NO:772
WHWGRLRMGQPFY

SEQ ID NO: 1733 - protein, 13 aa, Metschnikowia aff. pulcherrima
  REGION 1..13: note = Amino acid sequence of SEQ ID NO:773
WHWGRLRMGQPMY

SEQ ID NO: 1734 - protein, 11 aa, Metschnikowia aff. pulcherrima
  REGION 1..11: note = Amino acid sequence of SEQ ID NO:774
WHWGRLRMGQP

SEQ ID NO: 1735 - protein, 10 aa, Pyricularia oryzae
  REGION 1..10: note = Amino acid sequence of SEQ ID NO:775
WCPRRGQPCW

SEQ ID NO: 1736 - protein, 11 aa, unidentified
  REGION 1..11: note = Amino acid sequence of SEQ ID NO:776 (from Candida)
WGWLRFYPGEP

SEQ ID NO: 1737 - protein, 10 aa, unidentified
  REGION 1..10: note = Amino acid sequence of SEQ ID NO:777 (from Candida)
WGWLRFFPGE

SEQ ID NO: 1738 - protein, 11 aa, unidentified
  REGION 1..11: note = Amino acid sequence of SEQ ID NO:778 (from Candida)
WGWLRFFPGEP

SEQ ID NO: 1739 - protein, 11 aa, unidentified
  REGION 1..11: note = Amino acid sequence of SEQ ID NO:779 (from Candida)
WGWLRFYPGEP

SEQ ID NO: 1740 - protein, 11 aa, unidentified
  REGION 1..11: note = Amino acid sequence of SEQ ID NO:780 (from Candida)
WGWLRFFPGEP

SEQ ID NO: 1741 - protein, 12 aa, Kluyveromyces lactis
  REGION 1..12: note = Amino acid sequence of SEQ ID NO:781
WSWITLRPGQPI

SEQ ID NO: 1742 - protein, 10 aa, Fusarium fujikuroi
  REGION 1..10: note = Amino acid sequence of SEQ ID NO:782
WCTWRGQPCW

SEQ ID NO: 1743 - protein, 10 aa, Fusarium fujikuroi
  REGION 1..10: note = Amino acid sequence of SEQ ID NO:783
WCMWRGQPCW

SEQ ID NO: 1744 - protein, 10 aa, Fusarium fujikuroi
  REGION 1..10: note = Amino acid sequence of SEQ ID NO:784
WCTWRGQPCW

SEQ ID NO: 1745 - protein, 10 aa, Fusarium fujikuroi
  REGION 1..10: note = Amino acid sequence of SEQ ID NO:785
WCMWRGQPCW

SEQ ID NO: 1746 - protein, 10 aa, Fusarium fujikuroi
  REGION 1..10: note = Amino acid sequence of SEQ ID NO:786
WCMWRGQPCW

SEQ ID NO: 1747 - protein, 10 aa, Fusarium fujikuroi
  REGION 1..10: note = Amino acid sequence of SEQ ID NO:787
WCTWRGQPCW

SEQ ID NO: 1748 - protein, 13 aa, Kluyveromyces marxianus
  REGION 1..13: note = Amino acid sequence of SEQ ID NO:788
WKWLSFRVGQPIY

SEQ ID NO: 1749 - protein, 12 aa, Kluyveromyces marxianus
  REGION 1..12: note = Amino acid sequence of SEQ ID NO:789
WKWLSFRVGQPI

SEQ ID NO: 1750 - protein, 13 aa, Kluyveromyces marxianus
  REGION 1..13: note = Amino acid sequence of SEQ ID NO:790
WKWLSFRIGQPIY

SEQ ID NO: 1751 - protein, 12 aa, Kluyveromyces marxianus
  REGION 1..12: note = Amino acid sequence of SEQ ID NO:791
WKWLSFRIGQPI

SEQ ID NO: 1752 - protein, 13 aa, Kluyveromyces marxianus
  REGION 1..13: note = Amino acid sequence of SEQ ID NO:792
WKWLSLRVGQPIY

SEQ ID NO: 1753 - protein, 12 aa, Kluyveromyces marxianus
  REGION 1..12: note = Amino acid sequence of SEQ ID NO:793
WKWLSLRVGQPI

SEQ ID NO: 1754 - protein, 11 aa, Kluyveromyces marxianus
  REGION 1..11: note = Amino acid sequence of SEQ ID NO:794
WLSFRVGQPIY

SEQ ID NO: 1755 - protein, 13 aa, Kluyveromyces marxianus
  REGION 1..13: note = Amino acid sequence of SEQ ID NO:795
WEWLSLRVGQPLY

SEQ ID NO: 1756 - protein, 11 aa, Kluyveromyces marxianus
  REGION 1..11: note = Amino acid sequence of SEQ ID NO:796
WEWLSLRVGQP

SEQ ID NO: 1757 - protein, 11 aa, Kluyveromyces marxianus
  REGION 1..11: note = Amino acid sequence of SEQ ID NO:797
WLSFRIGQPIY

SEQ ID NO: 1758 - protein, 11 aa, Kluyveromyces marxianus
  REGION 1..11: note = Amino acid sequence of SEQ ID NO:798
WLSLRVGQPIY

SEQ ID NO: 1759 - protein, 13 aa, Saccharomyces cerevisiae
  REGION 1..13: note = Amino acid sequence of SEQ ID NO:799
WHWLNLRPGQPMY

SEQ ID NO: 1760 - protein, 13 aa, Saccharomyces cerevisiae
  REGION 1..13: note = Amino acid sequence of SEQ ID NO:800
WHWLQLKPGQPMY

SEQ ID NO: 1761 - protein, 13 aa, Saccharomyces cerevisiae
  REGION 1..13: note = Amino acid sequence of SEQ ID NO:801
WHWLQLKPGQPMY

SEQ ID NO: 1762 - protein, 13 aa, Saccharomyces paradoxus
  REGION 1..13: note = Amino acid sequence of SEQ ID NO:802
WHWLNLRPGQPMY

SEQ ID NO: 1763 - protein, 13 aa, Saccharomyces paradoxus
  REGION 1..13: note = Amino acid sequence of SEQ ID NO:803
WHWLQLKPGQPMY

SEQ ID NO: 1764 - protein, 13 aa, Saccharomyces paradoxus
  REGION 1..13: note = Amino acid sequence of SEQ ID NO:804
WHWLQLKPGQPMY

SEQ ID NO: 1765 - protein, 13 aa, Saccharomyces pastorianus
  REGION 1..13: note = Amino acid sequence of SEQ ID NO:805
WHWLNLRPGQPMY

SEQ ID NO: 1766 - protein, 13 aa, Saccharomyces pastorianus
  REGION 1..13: note = Amino acid sequence of SEQ ID NO:806
WHWLQLKPGQPMY

SEQ ID NO: 1767 - protein, 13 aa, Saccharomyces pastorianus
  REGION 1..13: note = Amino acid sequence of SEQ ID NO:807
WHWLQLKPGQPMY

SEQ ID NO: 1768 - protein, 13 aa, Saccharomyces pastorianus
  REGION 1..13: note = Amino acid sequence of SEQ ID NO:808
WHWLQFKPGQPMY

SEQ ID NO: 1769 - protein, 13 aa, Saccharomyces pastorianus
  REGION 1..13: note = Amino acid sequence of SEQ ID NO:809
WHWLKLRPGQPMY

SEQ ID NO: 1770 - protein, 13 aa, Saccharomyces pastorianus
  REGION 1..13: note = Amino acid sequence of SEQ ID NO:810
WHWLQLRPGQPMY

SEQ ID NO: 1771 - protein, 13 aa, Saccharomyces pastorianus
  REGION 1..13: note = Amino acid sequence of SEQ ID NO:811
WHWLKLRPGQPMY

SEQ ID NO: 1772 - protein, 13 aa, Saccharomyces pastorianus
  REGION 1..13: note = Amino acid sequence of SEQ ID NO:812
WHWLTLRPGQPMY

SEQ ID NO: 1773 - protein, 10 aa, Fusarium oxysporum
  REGION 1..10: note = Amino acid sequence of SEQ ID NO:813
  source 1..10: note = Fo47
WCTWRGQPCW

SEQ ID NO: 1774 - protein, 10 aa, Fusarium oxysporum
  REGION 1..10: note = Amino acid sequence of SEQ ID NO:814
  source 1..10: note = Fo47
WCMWRGQPCW

SEQ ID NO: 1775 - protein, 10 aa, Fusarium oxysporum
  REGION 1..10: note = Amino acid sequence of SEQ ID NO:815
  source 1..10: note = Fo47
WCLWRGQPCW

SEQ ID NO: 1776 - protein, 12 aa, Zygotorulaspora mrakii
  REGION 1..12: note = Amino acid sequence of SEQ ID NO:816
WHWIRLSRGAPI

SEQ ID NO: 1777 - protein, 12 aa, Zygotorulaspora mrakii
  REGION 1..12: note = Amino acid sequence of SEQ ID NO:817
WHWIQLGKGAPI

SEQ ID NO: 1778 - protein, 12 aa, Zygotorulaspora mrakii
  REGION 1..12: note = Amino acid sequence of SEQ ID NO:818
WHWIRLGRGAPI

SEQ ID NO: 1779 - protein, 10 aa, Metarhizium brunneum
  REGION 1..10: note = Amino acid sequence of SEQ ID NO:819
WCGRPGQPCW

SEQ ID NO: 1780 - protein, 10 aa, Metarhizium brunneum
  REGION 1..10: note = Amino acid sequence of SEQ ID NO:820
WCWRPGQPCW

SEQ ID NO: 1781 - protein, 13 aa, Torulaspora globosa
  REGION 1..13: note = Amino acid sequence of SEQ ID NO:821
WHWISLRAGQPMY

SEQ ID NO: 1782 - protein, 12 aa, Torulaspora globosa
  REGION 1..12: note = Amino acid sequence of SEQ ID NO:822
WHWISLRAGQPM

SEQ ID NO: 1783 - protein, 11 aa, Torulaspora globosa
  REGION 1..11: note = Amino acid sequence of SEQ ID NO:823
WHWISLRAGQP

SEQ ID NO: 1784 - protein, 13 aa, Torulaspora globosa
  REGION 1..13: note = Amino acid sequence of SEQ ID NO:824
WHWISLRTGQPMY

SEQ ID NO: 1785 - protein, 12 aa, Torulaspora globosa
  REGION 1..12: note = Amino acid sequence of SEQ ID NO:825
WHWISLRTGQPM

SEQ ID NO: 1786 - protein, 11 aa, Torulaspora globosa
  REGION 1..11: note = Amino acid sequence of SEQ ID NO:826
WHWISLRTGQP

SEQ ID NO: 1787 - protein, 13 aa, Torulaspora globosa
  REGION 1..13: note = Amino acid sequence of SEQ ID NO:827
WHWISLRTGQPMY

SEQ ID NO: 1788 - protein, 12 aa, Torulaspora globosa
  REGION 1..12: note = Amino acid sequence of SEQ ID NO:828
WHWISLRTGQPM

SEQ ID NO: 1789 - protein, 11 aa, Torulaspora globosa
  REGION 1..11: note = Amino acid sequence of SEQ ID NO:829
WHWISLRTGQP

SEQ ID NO: 1790 - protein, 10 aa, Monilinia fructigena
  REGION 1..10: note = Amino acid sequence of SEQ ID NO:830
WCGRPGQGCK

SEQ ID NO: 1791 - protein, 9 aa, Monilinia fructigena
  REGION 1..9: note = Amino acid sequence of SEQ ID NO:831
WCGRPGQGC

SEQ ID NO: 1792 - protein, 10 aa, Fusarium proliferatum
  REGION 1..10: note = Amino acid sequence of SEQ ID NO:832
WCMWRGQPCW

SEQ ID NO: 1793 - protein, 10 aa, Fusarium proliferatum
  REGION 1..10: note = Amino acid sequence of SEQ ID NO:833
WCTWRGQPCW

SEQ ID NO: 1794 - protein, 10 aa, Verticillium dahliae
  REGION 1..10: note = Amino acid sequence of SEQ ID NO:834
PCPRPGQGCW

SEQ ID NO: 1795 - protein, 10 aa, Fusarium verticillioides
  REGION 1..10: note = Amino acid sequence of SEQ ID NO:835
WCTWRGQPCW

SEQ ID NO: 1796 - protein, 10 aa, Fusarium verticillioides
  REGION 1..10: note = Amino acid sequence of SEQ ID NO:836
WCMWRGQPCW

SEQ ID NO: 1797 - protein, 9 aa, Fusarium coffeatum
  REGION 1..9: note = Amino acid sequence of SEQ ID NO:837
WCTWKGQPC

SEQ ID NO: 1798 - protein, 10 aa, Fusarium coffeatum
  REGION 1..10: note = Amino acid sequence of SEQ ID NO:838
WCLWKGQPCW

SEQ ID NO: 1799 - protein, 10 aa, Fusarium coffeatum
  REGION 1..10: note = Amino acid sequence of SEQ ID NO:839
WCWWKGQPCW

SEQ ID NO: 1800 - protein, 10 aa, Fusarium coffeatum
  REGION 1..10: note = Amino acid sequence of SEQ ID NO:840
WCTWKGQPCW

SEQ ID NO: 1801 - protein, 10 aa, Fusarium flagelliforme
  REGION 1..10: note = Amino acid sequence of SEQ ID NO:841
WCWIKGQPCW

SEQ ID NO: 1802 - protein, 10 aa, Fusarium flagelliforme
  REGION 1..10: note = Amino acid sequence of SEQ ID NO:842
WCWIKGQPCW

SEQ ID NO: 1803 - protein, 10 aa, Fusarium sporotrichioides
  REGION 1..10: note = Amino acid sequence of SEQ ID NO:843
WCTWKGQPCW

SEQ ID NO: 1804 - protein, 10 aa, Fusarium sporotrichioides
  REGION 1..10: note = Amino acid sequence of SEQ ID NO:844
WCWWKGQPCW

SEQ ID NO: 1805 - protein, 10 aa, Fusarium longipes
  REGION 1..10: note = Amino acid sequence of SEQ ID NO:845
WCTWKGQPCW

SEQ ID NO: 1806 - protein, 10 aa, Fusarium longipes
  REGION 1..10: note = Amino acid sequence of SEQ ID NO:846
WCWWKGQPCW

SEQ ID NO: 1807 - protein, 10 aa, Fusarium oxysporum
  REGION 1..10: note = Amino acid sequence of SEQ ID NO:847
  source 1..10: note = f. sp. cepae
WCLWRGQPCW

SEQ ID NO: 1808 - protein, 10 aa, Fusarium oxysporum
  REGION 1..10: note = Amino acid sequence of SEQ ID NO:848
  source 1..10: note = f. sp. cepae
WCTWRGQPCW

SEQ ID NO: 1809 - protein, 10 aa, Fusarium oxysporum
  REGION 1..10: note = Amino acid sequence of SEQ ID NO:849
  source 1..10: note = f. sp. cepae
WCMWRGQPCW

SEQ ID NO: 1810 - protein, 10 aa, Fusarium oxysporum
  REGION 1..10: note = Amino acid sequence of SEQ ID NO:850
  source 1..10: note = f. sp. cepae
WCMWRGQPCW

SEQ ID NO: 1811 - protein, 10 aa, Fusarium oxysporum
  REGION 1..10: note = Amino acid sequence of SEQ ID NO:851
  source 1..10: note = f. sp. cepae
WCLWRGQPCW

SEQ ID NO: 1812 - protein, 10 aa, Fusarium oxysporum
  REGION 1..10: note = Amino acid sequence of SEQ ID NO:852
  source 1..10: note = f. sp. cepae
WCTWRGQPCW

SEQ ID NO: 1813 - protein, 10 aa, Fusarium oxysporum
  REGION 1..10: note = Amino acid sequence of SEQ ID NO:853
  source 1..10: note = f. sp. cepae
WCMWRGQPCW

SEQ ID NO: 1814 - protein, 10 aa, Fusarium oxysporum
  REGION 1..10: note = Amino acid sequence of SEQ ID NO:854
  source 1..10: note = f. sp. cepae
WCLWRGQPCW

SEQ ID NO: 1815 - protein, 10 aa, Fusarium oxysporum
  REGION 1..10: note = Amino acid sequence of SEQ ID NO:855
  source 1..10: note = f. sp. cepae
WCTWRGQPCW

SEQ ID NO: 1816 - protein, 10 aa, Fusarium oxysporum
  REGION 1..10: note = Amino acid sequence of SEQ ID NO:856
WCMWRGQPCW

SEQ ID NO: 1817 - protein, 10 aa, Fusarium oxysporum
  REGION 1..10: note = Amino acid sequence of SEQ ID NO:857
WCLWRGQPCW

SEQ ID NO: 1818 - protein, 10 aa, Fusarium oxysporum
  REGION 1..10: note = Amino acid sequence of SEQ ID NO:858
WCTWRGQPCW

SEQ ID NO: 1819 - protein, 10 aa, Fusarium oxysporum
  REGION 1..10: note = Amino acid sequence of SEQ ID NO:859
WCMWRGQPCW

SEQ ID NO: 1820 - protein, 10 aa, Fusarium oxysporum
  REGION 1..10: note = Amino acid sequence of SEQ ID NO:860
WCLWRGQPCW

SEQ ID NO: 1821 - protein, 10 aa, Fusarium oxysporum
  REGION 1..10: note = Amino acid sequence of SEQ ID NO:861
WCTWRGQPCW

SEQ ID NO: 1822 - protein, 10 aa, Fusarium oxysporum
  REGION 1..10: note = Amino acid sequence of SEQ ID NO:862
WCLWRGQPCW

SEQ ID NO: 1823 - protein, 10 aa, Fusarium oxysporum
  REGION 1..10: note = Amino acid sequence of SEQ ID NO:863
WCTWRGQPCW

SEQ ID NO: 1824 - protein, 10 aa, Fusarium oxysporum
  REGION 1..10: note = Amino acid sequence of SEQ ID NO:864
WCMWRGQPCW

SEQ ID NO: 1825 - protein, 10 aa, Fusarium oxysporum
  REGION 1..10: note = Amino acid sequence of SEQ ID NO:865
WCTWRGQPCW

SEQ ID NO: 1826 - protein, 10 aa, Fusarium oxysporum
  REGION 1..10: note = Amino acid sequence of SEQ ID NO:866
WCLWRGQPCW

SEQ ID NO: 1827 - protein, 10 aa, Fusarium oxysporum
  REGION 1..10: note = Amino acid sequence of SEQ ID NO:867
WCMWRGQPCW

SEQ ID NO: 1828 - protein, 10 aa, Fusarium proliferatum
  REGION 1..10: note = Amino acid sequence of SEQ ID NO:868
WCTWRGQPCW

SEQ ID NO: 1829 - protein, 10 aa, Fusarium proliferatum
  REGION 1..10: note = Amino acid sequence of SEQ ID NO:869
WCMWRGQPCW

SEQ ID NO: 1830 - protein, 10 aa, Coniochaeta pulveracea
  REGION 1..10: note = Amino acid sequence of SEQ ID NO:870
WCPHKGQPCW

SEQ ID NO: 1831 - protein, 10 aa, Coniochaeta pulveracea
  REGION 1..10: note = Amino acid sequence of SEQ ID NO:871
WCPHPGQPCW

SEQ ID NO: 1832 - protein, 10 aa, Verticillium nonalfalfae
  REGION 1..10: note = Amino acid sequence of SEQ ID NO:872
PCPRPGQGCW

SEQ ID NO: 1833 - protein, 10 aa, Verticillium dahliae
  REGION 1..10: note = Amino acid sequence of SEQ ID NO:873
PCPRPGQGCW

SEQ ID NO: 1834 - protein, 10 aa, Fusarium oxysporum
  REGION 1..10: note = Amino acid sequence of SEQ ID NO:874
  source 1..10: note = f. sp. narcissi
WCTWRGQPCW

SEQ ID NO: 1835 - protein, 10 aa, Fusarium oxysporum
  REGION 1..10: note = Amino acid sequence of SEQ ID NO:875
  source 1..10: note = f. sp. narcissi
WCMWRGQPCW

SEQ ID NO: 1836 - protein, 10 aa, Fusarium oxysporum
  REGION 1..10: note = Amino acid sequence of SEQ ID NO:876
  source 1..10: note = f. sp. narcissi
WCLWRGQPCW

SEQ ID NO: 1837 - protein, 10 aa, Pochonia chlamydosporia
  REGION 1..10: note = Amino acid sequence of SEQ ID NO:877
  source 1..10: note = 123
WCWRPGQPCW

SEQ ID NO: 1838 - protein, 10 aa, Pochonia chlamydosporia
  REGION 1..10: note = Amino acid sequence of SEQ ID NO:878
  source 1..10: note = 123
WCWRPGQSCW

SEQ ID NO: 1839 - protein, 10 aa, Fusarium fujikuroi
  REGION 1..10: note = Amino acid sequence of SEQ ID NO:879
WCTWRGQPCW

SEQ ID NO: 1840 - protein, 10 aa, Fusarium fujikuroi
  REGION 1..10: note = Amino acid sequence of SEQ ID NO:880
WCMWRGQPCW

SEQ ID NO: 1841 - protein, 10 aa, Fusarium fujikuroi
  REGION 1..10: note = Amino acid sequence of SEQ ID NO:881
WCMWRGQPCW

SEQ ID NO: 1842 - protein, 10 aa, Fusarium fujikuroi
  REGION 1..10: note = Amino acid sequence of SEQ ID NO:882
WCTWRGQPCW

SEQ ID NO: 1843 - protein, 10 aa, Fusarium fujikuroi
  REGION 1..10: note = Amino acid sequence of SEQ ID NO:883
WCTWRGQPCW

SEQ ID NO: 1844 - protein, 10 aa, Fusarium fujikuroi
  REGION 1..10: note = Amino acid sequence of SEQ ID NO:884
WCMWRGQPCW

SEQ ID NO: 1845 - protein, 10 aa, Fusarium fujikuroi
  REGION 1..10: note = Amino acid sequence of SEQ ID NO:885
WCMWRGQPCW

SEQ ID NO: 1846 - protein, 10 aa, Fusarium fujikuroi
  REGION 1..10: note = Amino acid sequence of SEQ ID NO:886
WCTWRGQPCW

SEQ ID NO: 1847 - protein, 10 aa, Fusarium fujikuroi
  REGION 1..10: note = Amino acid sequence of SEQ ID NO:887
WCTWRGQPCW

SEQ ID NO: 1848 - protein, 10 aa, Fusarium fujikuroi
  REGION 1..10: note = Amino acid sequence of SEQ ID NO:888
WCMWRGQPCW

SEQ ID NO: 1849 - protein, 10 aa, Fusarium fujikuroi
  REGION 1..10: note = Amino acid sequence of SEQ ID NO:889
WCMWRGQPCW

SEQ ID NO: 1850 - protein, 10 aa, Fusarium fujikuroi
  REGION 1..10: note = Amino acid sequence of SEQ ID NO:890
WCTWRGQPCW

SEQ ID NO: 1851 - protein, 10 aa, Fusarium oxysporum
  REGION 1..10: note = Amino acid sequence of SEQ ID NO:891
WCTWRGQPCW

SEQ ID NO: 1852 - protein, 10 aa, Fusarium oxysporum
  REGION 1..10: note = Amino acid sequence of SEQ ID NO:892
WCLWRGQPCW

SEQ ID NO: 1853 - protein, 10 aa, Fusarium oxysporum
  REGION 1..10: note = Amino acid sequence of SEQ ID NO:893
WCMWRGQPCW

SEQ ID NO: 1854 - protein, 13 aa, Lachancea sp.
  REGION 1..13: note = Amino acid sequence of SEQ ID NO:894
  source 1..13: note = CBS 6924
WRWLRLDRGQPMY

SEQ ID NO: 1855 - protein, 11 aa, Lachancea sp.
  REGION 1..11: note = Amino acid sequence of SEQ ID NO:895
  source 1..11: note = CBS 6924
WLRLDRGQPMY

SEQ ID NO: 1856 - protein, 13 aa, Lachancea meyersii
  REGION 1..13: note = Amino acid sequence of SEQ ID NO:896
  source 1..13: note = CBS 8951
WHWLRLDRGQPMY

SEQ ID NO: 1857 - protein, 13 aa, Lachancea meyersii
  REGION 1..13: note = Amino acid sequence of SEQ ID NO:897
  source 1..13: note = CBS 8951
WHWLKLDRGQPMY

SEQ ID NO: 1858 - protein, 11 aa, Lachancea meyersii
  REGION 1..11: note = Amino acid sequence of SEQ ID NO:898
  source 1..11: note = CBS 8951
WHWLKLDRGQP

SEQ ID NO: 1859 - protein, 11 aa, Lachancea meyersii
  REGION 1..11: note = Amino acid sequence of SEQ ID NO:899
  source 1..11: note = CBS 8951
WHWLRLDRGQP

SEQ ID NO: 1860 - protein, 13 aa, Lachancea dasiensis
  REGION 1..13: note = Amino acid sequence of SEQ ID NO:900
  source 1..13: note = CBS 10888
WKWLRLGRGQPMY

SEQ ID NO: 1861 - protein, 11 aa, Lachancea dasiensis
  REGION 1..11: note = Amino acid sequence of SEQ ID NO:901
  source 1..11: note = CBS 10888
WKWLRLGRGQP

SEQ ID NO: 1862 - protein, 13 aa, Lachancea dasiensis
  REGION 1..13: note = Amino acid sequence of SEQ ID NO:902
  source 1..13: note = CBS 10888
WSWLRLGRGQPMY

SEQ ID NO: 1863 - protein, 11 aa, Lachancea dasiensis
  REGION 1..11: note = Amino acid sequence of SEQ ID NO:903
  source 1..11: note = CBS 10888
WSWLRLGRGQP

SEQ ID NO: 1864 - protein, 13 aa, Lachancea dasiensis
  REGION 1..13: note = Amino acid sequence of SEQ ID NO:904
  source 1..13: note = CBS 10888
WRWLRLGRGQPMY

SEQ ID NO: 1865 - protein, 11 aa, Lachancea dasiensis
  REGION 1..11: note = Amino acid sequence of SEQ ID NO:905
  source 1..11: note = CBS 10888
WRWLRLGRGQP

SEQ ID NO: 1866 - protein, 13 aa, Lachancea dasiensis
  REGION 1..13: note = Amino acid sequence of SEQ ID NO:906
  source 1..13: note = CBS 10888
WQWLRLGRGQPMY

SEQ ID NO: 1867 - protein, 11 aa, Lachancea dasiensis
  REGION 1..11: note = Amino acid sequence of SEQ ID NO:907
  source 1..11: note = CBS 10888
WQWLRLGRGQP

SEQ ID NO: 1868 - protein, 13 aa, Lachancea dasiensis
  REGION 1..13: note = Amino acid sequence of SEQ ID NO:908
  source 1..13: note = CBS 10888
WRWLRLDRGQPMY

SEQ ID NO: 1869 - protein, 11 aa, Lachancea dasiensis
  REGION 1..11: note = Amino acid sequence of SEQ ID NO:909
  source 1..11: note = CBS 10888
WRWLRLDRGQP

SEQ ID NO: 1870 - protein, 11 aa, Lachancea dasiensis
  REGION 1..11: note = Amino acid sequence of SEQ ID NO:910
  source 1..11: note = CBS 10888
WLRLGRGQPMY

SEQ ID NO: 1871 - protein, 11 aa, Lachancea dasiensis
  REGION 1..11: note = Amino acid sequence of SEQ ID NO:911
  source 1..11: note = CBS 10888
WLRLDRGQPMY

SEQ ID NO: 1872 - protein, 13 aa, Lachancea dasiensis
  REGION 1..13: note = Amino acid sequence of SEQ ID NO:912
  source 1..13: note = CBS 10888
WTWLKLDRGQPMY

SEQ ID NO: 1873 - protein, 11 aa, Lachancea nothofagi
  REGION 1..11: note = Amino acid sequence of SEQ ID NO:913
  source 1..11: note = CBS 11611
WTWLKLDRGQP

SEQ ID NO: 1874 - protein, 11 aa, Lachancea nothofagi
  REGION 1..11: note = Amino acid sequence of SEQ ID NO:914
  source 1..11: note = CBS 11611
WRWLRLDRGQP

SEQ ID NO: 1875 - protein, 13 aa, Lachancea nothofagi
  REGION 1..13: note = Amino acid sequence of SEQ ID NO:915
  source 1..13: note = CBS 11611
WRWLRLDRGQPMY

SEQ ID NO: 1876 - protein, 13 aa, Lachancea nothofagi
  REGION 1..13: note = Amino acid sequence of SEQ ID NO:916
  source 1..13: note = CBS 11611
WSWLRLDRGQPMY

SEQ ID NO: 1877 - protein, 11 aa, Lachancea nothofagi
  REGION 1..11: note = Amino acid sequence of SEQ ID NO:917
  source 1..11: note = CBS 11611
WSWLRLDRGQP

SEQ ID NO: 1878 - protein, 11 aa, Lachancea nothofagi
  REGION 1..11: note = Amino acid sequence of SEQ ID NO:918
  source 1..11: note = CBS 11611
WLKLDRGQPMY

SEQ ID NO: 1879 - protein, 11 aa, Lachancea nothofagi
  REGION 1..11: note = Amino acid sequence of SEQ ID NO:919
  source 1..11: note = CBS 11611
WLRLDRGQPMY

SEQ ID NO: 1880 - protein, 10 aa, Fusarium fujikuroi
  REGION 1..10: note = Amino acid sequence of SEQ ID NO:920
WCMWRGQPCW

SEQ ID NO: 1881 - protein, 10 aa, Fusarium fujikuroi
  REGION 1..10: note = Amino acid sequence of SEQ ID NO:921
WCTWRGQPCW

SEQ ID NO: 1882 - protein, 10 aa, Fusarium fujikuroi
  REGION 1..10: note = Amino acid sequence of SEQ ID NO:922
WCMWRGQPCW

SEQ ID NO: 1883 - protein, 10 aa, Fusarium fujikuroi
  REGION 1..10: note = Amino acid sequence of SEQ ID NO:923
WCTWRGQPCW

SEQ ID NO: 1884 - protein, 13 aa, Lachancea fermentati
  REGION 1..13: note = Amino acid sequence of SEQ ID NO:924
WHWLRLGKGQPLY

SEQ ID NO: 1885 - protein, 13 aa, Lachancea fermentati
  REGION 1..13: note = Amino acid sequence of SEQ ID NO:925
WHWLRLSSGQPLY

SEQ ID NO: 1886 - protein, 13 aa, Kazachstania saulgeensis
  REGION 1..13: note = Amino acid sequence of SEQ ID NO:926
WHWLELDWGQPLY

SEQ ID NO: 1887 - protein, 13 aa, Kazachstania saulgeensis
  REGION 1..13: note = Amino acid sequence of SEQ ID NO:927
WHWLELDWGQPLY

SEQ ID NO: 1888 - protein, 13 aa, Saccharomycodes ludwigii
  REGION 1..13: note = Amino acid sequence of SEQ ID NO:928
WQWLSFQWGEPMY

SEQ ID NO: 1889 - protein, 13 aa, Saccharomycodes ludwigii
  REGION 1..13: note = Amino acid sequence of SEQ ID NO:929
WQWLTFQWGEPMY

SEQ ID NO: 1890 - protein, 10 aa, Chlorociboria aeruginascens
  REGION 1..10: note = Amino acid sequence of SEQ ID NO:930
KCGRPGQGCK

SEQ ID NO: 1891 - protein, 9 aa, Botryotinia calthae
  REGION 1..9: note = Amino acid sequence of SEQ ID NO:931
WCGRPGQPC

SEQ ID NO: 1892 - protein, 10 aa, Botryotinia calthae
  REGION 1..10: note = Amino acid sequence of SEQ ID NO:932
WCGRPGQPCK

SEQ ID NO: 1893 - protein, 10 aa, Botrytis tulipae
  REGION 1..10: note = Amino acid sequence of SEQ ID NO:933
WCGRPGQPCK

SEQ ID NO: 1894 - protein, 9 aa, Botrytis tulipae
  REGION 1..9: note = Amino acid sequence of SEQ ID NO:934
WCGRPGQPC

SEQ ID NO: 1895 - protein, 10 aa, Botrytis paeoniae
  REGION 1..10: note = Amino acid sequence of SEQ ID NO:935
WCGRPGQPCK

SEQ ID NO: 1896 - protein, 9 aa, Botrytis paeoniae
  REGION 1..9: note = Amino acid sequence of SEQ ID NO:936
WCGRPGQPC

SEQ ID NO: 1897 - protein, 9 aa, Botrytis hyacinthi
  REGION 1..9: note = Amino acid sequence of SEQ ID NO:937
WCGRPGQPC

SEQ ID NO: 1898 - protein, 10 aa, Botrytis hyacinthi
  REGION 1..10: note = Amino acid sequence of SEQ ID NO:938
WCGRPGQPCK

SEQ ID NO: 1899 - protein, 10 aa, Botryotinia convoluta
  REGION 1..10: note = Amino acid sequence of SEQ ID NO:939
WCGRPGQPCK

SEQ ID NO: 1900 - protein, 9 aa, Botryotinia convoluta
  REGION 1..9: note = Amino acid sequence of SEQ ID NO:940
WCGRPGQPC

SEQ ID NO: 1901 - protein, 10 aa, Botryotinia narcissicola
  REGION 1..10: note = Amino acid sequence of SEQ ID NO:941
WCGRPGQPCK

SEQ ID NO: 1902 - protein, 9 aa, Botryotinia narcissicola
  REGION 1..9: note = Amino acid sequence of SEQ ID NO:942
WCGRPGQPC

SEQ ID NO: 1903 - protein, 10 aa, Botrytis elliptica
  REGION 1..10: note = Amino acid sequence of SEQ ID NO:943
WCGRPGQPCK

SEQ ID NO: 1904 - protein, 9 aa, Botrytis elliptica
  REGION 1..9: note = Amino acid sequence of SEQ ID NO:944
WCGRPGQPC

SEQ ID NO: 1905 - protein, 10 aa, Botrytis porri
  REGION 1..10: note = Amino acid sequence of SEQ ID NO:945
WCGRPGQPCK

SEQ ID NO: 1906 - protein, 9 aa, Botrytis porri
  REGION 1..9: note = Amino acid sequence of SEQ ID NO:946
WCGRPGQPC

SEQ ID NO: 1907 - protein, 9 aa, Botrytis galanthina
  REGION 1..9: note = Amino acid sequence of SEQ ID NO:947
WCGRPGQPC

SEQ ID NO: 1908 - protein, 10 aa, Botrytis galanthina
  REGION 1..10: note = Amino acid sequence of SEQ ID NO:948
WCGRPGQPCK

SEQ ID NO: 1909 - protein, 10 aa, Pyricularia grisea
  REGION 1..10: note = Amino acid sequence of SEQ ID NO:949
WCPRRGQPCW

SEQ ID NO: 1910 - protein, 10 aa, Pyricularia sp.
  REGION 1..10: note = Amino acid sequence of SEQ ID NO:950
  source 1..10: note = CBS 133598
WCPRRGQPCW

SEQ ID NO: 1911 - protein, 10 aa, Pyricularia pennisetigena
  REGION 1..10: note = Amino acid sequence of SEQ ID NO:951
WCPRRGQPCW

SEQ ID NO: 1912 - protein, 10 aa, Fusarium oxysporum
  REGION 1..10: note = Amino acid sequence of SEQ ID NO:952
  source 1..10: note = f. sp. cubense
WCLWRGQPCW

SEQ ID NO: 1913 - protein, 10 aa, Fusarium oxysporum
  REGION 1..10: note = Amino acid sequence of SEQ ID NO:953
  source 1..10: note = f. sp. cubense
WCTWRGQPCW

SEQ ID NO: 1914 - protein, 10 aa, Fusarium oxysporum
  REGION 1..10: note = Amino acid sequence of SEQ ID NO:954
  source 1..10: note = f. sp. cubense
WCMWRGQPCW

SEQ ID NO: 1915 - protein, 10 aa, Metarhizium rileyi
  REGION 1..10: note = Amino acid sequence of SEQ ID NO:955
WCWRPGQPCW

SEQ ID NO: 1916 - protein, 10 aa, Fusarium oxysporum
  REGION 1..10: note = Amino acid sequence of SEQ ID NO:956
  source 1..10: note = f. sp. cubense
WCMWRGQPCW

SEQ ID NO: 1917 - protein, 10 aa, Fusarium oxysporum
  REGION 1..10: note = Amino acid sequence of SEQ ID NO:957
  source 1..10: note = f. sp. cubense
WCLWRGQPCW

SEQ ID NO: 1918 - protein, 10 aa, Fusarium oxysporum
  REGION 1..10: note = Amino acid sequence of SEQ ID NO:958
  source 1..10: note = f. sp. cubense
WCTWRGQPCW

SEQ ID NO: 1919 - protein, 10 aa, Fusarium graminearum
  REGION 1..10: note = Amino acid sequence of SEQ ID NO:959
WCTWKGQPCW

SEQ ID NO: 1920 - protein, 10 aa, Fusarium graminearum
  REGION 1..10: note = Amino acid sequence of SEQ ID NO:960
WCWWKGQPCW

SEQ ID NO: 1921 - protein, 13 aa, synthetic construct
  REGION 1..13: note = Motif
  VARIANT 2: note = X = T, E, K, Q, S, R, G or H
  VARIANT 4: note = X = G, I, V or L
  VARIANT 5: note = X = A, T, K, E, N, S, R or Q
  VARIANT 6: note = X = I, F or L
  VARIANT 7: note = X = E, A, Y, Q, M, F, S, G, D, R or K
  VARIANT 8: note = X = N, T, L, A, Y, I, W, V, M, K, R or P
  VARIANT 10: note = X = A, E, or Q
  VARIANT 12: note = X = F, L, I or M
WXWXXXXXGXPXY

SEQ ID NO: 1922 - protein, 13 aa, synthetic construct
  REGION 1..13: note = Motif
  VARIANT 5: note = X = A, T, K, E, N, S, R or Q
  VARIANT 7: note = X = E, A, Y, Q, M, F, S, G, D, R or K
  VARIANT 8: note = X = N, T, L, A, Y, I, W, V, M, K, R or P
WHWLXLXXGQPMY

SEQ ID NO: 1923 - protein, 13 aa, synthetic construct
  REGION 1..13: note = Motif
  VARIANT 5: note = X = A, T, K, E, N, S, R or Q
  VARIANT 7: note = X = E, A, Y, Q, M, F, S, G, D, R or K
  VARIANT 8: note = X = N, T, L, A, Y, I, W, V, M, K, R or P
  VARIANT 10: note = X = A, E, or Q
  VARIANT 12: note = X = F, L, I or M
WHWLXLXXGXPXY

SEQ ID NO: 1924 - protein, 13 aa, synthetic construct
  REGION 1..13: note = Motif
  VARIANT 2: note = X = T, E, K, Q, S, R, G or H
  VARIANT 4: note = X = G, I, V or L
  VARIANT 5: note = X = A, T, K, E, N, S, R or Q
  VARIANT 7: note = X = E, A, Y, Q, M, F, S, G, D, R or K
WXWXXLXPGQPMY

SEQ ID NO: 1925 - protein, 13 aa, synthetic construct
  REGION 1..13: note = Motif
  VARIANT 7: note = X = E, A, Y, Q, M, F, S, G, D, R or K
  VARIANT 8: note = X = N, T, L, A, Y, I, W, V, M, K, R or P
  VARIANT 10: note = X = A, E, or Q
  VARIANT 12: note = X = F, L, I or M
WHWLRLXXGXPXY

SEQ ID NO: 1926 - protein, 13 aa, synthetic construct
  REGION 1..13: note = Motif
  VARIANT 7: note = X = E, A, Y, Q, M, F, S, G, D, R or K
  VARIANT 8: note = X = N, T, L, A, Y, I, W, V, M, K, R or P
  VARIANT 10: note = X = A, E, or Q
  VARIANT 12: note = X = F, L, I or M
WHWLQLXXGXPXY

SEQ ID NO: 1927 - protein, 13 aa, synthetic construct
  REGION 1..13: note = Motif
  VARIANT 8: note = X = N, T, L, A, Y, I, W, V, M, K, R or P
  VARIANT 10: note = X = A, E, or Q
  VARIANT 12: note = X = F, L, I or M
WHWLRLKXGXPXY

SEQ ID NO: 1928 - protein, 13 aa, synthetic construct
  REGION 1..13: note = Motif
  VARIANT 8: note = X = N, T, L, A, Y, I, W, V, M, K, R or P
  VARIANT 10: note = X = A, E, or Q
  VARIANT 12: note = X = F, L, I or M
WHWLRLRXGXPXY

SEQ ID NO: 1929 - protein, 13 aa, synthetic construct
  REGION 1..13: note = Motif
  VARIANT 8: note = X = N, T, L, A, Y, I, W, V, M, K, R or P
  VARIANT 10: note = X = A, E, or Q
  VARIANT 12: note = X = F, L, I or M
WHWLQLKXGXPXY

SEQ ID NO: 1930 - protein, 13 aa, synthetic construct
  REGION 1..13: note = Motif
  VARIANT 8: note = X = N, T, L, A, Y, I, W, V, M, K, R or P
  VARIANT 10: note = X = A, E, or Q
  VARIANT 12: note = X = F, L, I or M
WHWLQLRXGXPXY

SEQ ID NO: 1931 - protein, 13 aa, synthetic construct
  REGION 1..13: note = Motif
  VARIANT 7: note = X = E, A, Y, Q, M, F, S, G, D, R or K
  VARIANT 10: note = X = A, E, or Q
  VARIANT 12: note = X = F, L, I or M
WHWLRLXPGXPXY

SEQ ID NO: 1932 - protein, 13 aa, synthetic construct
  REGION 1..13: note = Motif
  VARIANT 10: note = X = A, E, or Q
  VARIANT 12: note = X = F, L, I or M
WHWLRLKPGXPXY

SEQ ID NO: 1933 - protein, 13 aa, synthetic construct
  REGION 1..13: note = Motif
  VARIANT 10: note = X = A, E, or Q
  VARIANT 12: note = X = F, L, I or M
WHWLRLRPGXPXY

SEQ ID NO: 1934 - protein, 13 aa, synthetic construct
  REGION 1..13: note = Motif
  VARIANT 7: note = X = E, A, Y, Q, M, F, S, G, D, R or K
  VARIANT 10: note = X = A, E, or Q
  VARIANT 12: note = X = F, L, I or M
WHWLQLXPGXPXY

SEQ ID NO: 1935 - protein, 13 aa, synthetic construct
  REGION 1..13: note = Motif
  VARIANT 10: note = X = A, E, or Q
  VARIANT 12: note = X = F, L, I or M
WHWLQLKPGXPXY

SEQ ID NO: 1936 - protein, 13 aa, synthetic construct
  REGION 1..13: note = Motif
  VARIANT 10: note = X = A, E, or Q
  VARIANT 12: note = X = F, L, I or M
WHWLQLRPGXPXY

SEQ ID NO: 1937 - protein, 13 aa, synthetic construct
  REGION 1..13: note = Motif
  VARIANT 7: note = X = E, A, Y, Q, M, F, S, G, D, R or K
  VARIANT 8: note = X = N, T, L, A, Y, I, W, V, M, K, R or P
  VARIANT 12: note = X = F, L, I or M
WHWLRLXXGQPXY

SEQ ID NO: 1938 - protein, 13 aa, synthetic construct
  REGION 1..13: note = Motif
  VARIANT 7: note = X = E, A, Y, Q, M, F, S, G, D, R or K
  VARIANT 12: note = X = F, L, I or M
WHWLRLXPGQPXY

SEQ ID NO: 1939 - protein, 13 aa, synthetic construct
  REGION 1..13: note = Motif
  VARIANT 7: note = X = E, A, Y, Q, M, F, S, G, D, R or K
  VARIANT 8: note = X = N, T, L, A, Y, I, W, V, M, K, R or P
  VARIANT 12: note = X = F, L, I or M
WHWLQLXXGQPXY

SEQ ID NO: 1940 - protein, 13 aa, synthetic construct
  REGION 1..13: note = Motif
  VARIANT 7: note = X = E, A, Y, Q, M, F, S, G, D, R or K
  VARIANT 12: note = X = F, L, I or M
WHWLQLXPGQPXY

SEQ ID NO: 1941 - protein, 13 aa, synthetic construct
  REGION 1..13: note = Motif
  VARIANT 7: note = X = E, A, Y, Q, M, F, S, G, D, R or K
  VARIANT 8: note = X = N, T, L, A, Y, I, W, V, M, K, R or P
  VARIANT 10: note = X = A, E, or Q
WHWLRLXXGXPMY

SEQ ID NO: 1942 - protein, 13 aa, synthetic construct
  REGION 1..13: note = Motif
  VARIANT 7: note = X = E, A, Y, Q, M, F, S, G, D, R or K
  VARIANT 8: note = X = N, T, L, A, Y, I, W, V, M, K, R or P
WHWLRLXXGQPMY

SEQ ID NO: 1943 - protein, 13 aa, synthetic construct
  REGION 1..13: note = Motif
  VARIANT 7: note = X = E, A, Y, Q, M, F, S, G, D, R or K
  VARIANT 10: note = X = A, E, or Q
WHWLRLXPGXPMY

SEQ ID NO: 1944 - protein, 13 aa, synthetic construct
  REGION 1..13: note = Motif
  VARIANT 7: note = X = E, A, Y, Q, M, F, S, G, D, R or K
  VARIANT 8: note = X = N, T, L, A, Y, I, W, V, M, K, R or P
  VARIANT 10: note = X = A, E, or Q
WHWLQLXXGXPMY

SEQ ID NO: 1945 - protein, 13 aa, synthetic construct
  REGION 1..13: note = Motif
  VARIANT 7: note = X = E, A, Y, Q, M, F, S, G, D, R or K
  VARIANT 8: note = X = N, T, L, A, Y, I, W, V, M, K, R or P
WHWLQLXXGQPMY

SEQ ID NO: 1946 - protein, 13 aa, synthetic construct
  REGION 1..13: note = Motif
  VARIANT 7: note = X = E, A, Y, Q, M, F, S, G, D, R or K
  VARIANT 10: note = X = A, E, or Q
WHWLQLXPGXPMY

SEQ ID NO: 1947 - protein, 13 aa, synthetic construct
  REGION 1..13: note = Motif
  VARIANT 2: note = X = T, E, K, Q, S, R, G or H
  VARIANT 4: note = X = G, I, V or L
  VARIANT 5: note = X = A, T, K, E, N, S, R or Q
  VARIANT 6: note = X = I, F or L
  VARIANT 10: note = X = A, E, or Q
  VARIANT 12: note = X = F, L, I or M
WXWXXXRPGXPXY

SEQ ID NO: 1948 - protein, 13 aa, synthetic construct
  REGION 1..13: note = Motif
  VARIANT 2: note = X = T, E, K, Q, S, R, G or H
  VARIANT 4: note = X = G, I, V or L
  VARIANT 5: note = X = A, T, K, E, N, S, R or Q
  VARIANT 6: note = X = I, F or L
  VARIANT 12: note = X = F, L, I or M
WXWXXXRPGQPXY

SEQ ID NO: 1949 - protein, 13 aa, synthetic construct
  REGION 1..13: note = Motif
  VARIANT 2: note = X = T, E, K, Q, S, R, G or H
  VARIANT 4: note = X = G, I, V or L
  VARIANT 5: note = X = A, T, K, E, N, S, R or Q
  VARIANT 6: note = X = I, F or L
  VARIANT 8: note = X = N, T, L, A, Y, I, W, V, M, K, R or P
  VARIANT 10: note = X = A, E, or Q
WXWXXXRXGXPMY

SEQ ID NO: 1950 - protein, 13 aa, synthetic construct
  REGION 1..13: note = Motif
  VARIANT 2: note = X = T, E, K, Q, S, R, G or H
  VARIANT 4: note = X = G, I, V or L
  VARIANT 5: note = X = A, T, K, E, N, S, R or Q
  VARIANT 6: note = X = I, F or L
  VARIANT 8: note = X = N, T, L, A, Y, I, W, V, M, K, R or P
WXWXXXRXGQPMY

SEQ ID NO: 1951 - protein, 13 aa, synthetic construct
  REGION 1..13: note = Motif
  VARIANT 2: note = X = T, E, K, Q, S, R, G or H
  VARIANT 4: note = X = G, I, V or L
  VARIANT 5: note = X = A, T, K, E, N, S, R or Q
  VARIANT 6: note = X = I, F or L
  VARIANT 10: note = X = A, E, or Q
WXWXXXRPGXPMY

SEQ ID NO: 1952 - protein, 13 aa, synthetic construct
  REGION 1..13: note = Motif
  VARIANT 2: note = X = T, E, K, Q, S, R, G or H
  VARIANT 4: note = X = G, I, V or L
  VARIANT 5: note = X = A, T, K, E, N, S, R or Q
  VARIANT 6: note = X = I, F or L
  VARIANT 10: note = X = A, E, or Q
  VARIANT 12: note = X = F, L, I or M
WXWXXXKPGXPXY

SEQ ID NO: 1953 - protein, 13 aa, synthetic construct
  REGION 1..13: note = Motif
  VARIANT 2: note = X = T, E, K, Q, S, R, G or H
  VARIANT 4: note = X = G, I, V or L
  VARIANT 5: note = X = A, T, K, E, N, S, R or Q
  VARIANT 6: note = X = I, F or L
  VARIANT 12: note = X = F, L, I or M
WXWXXXKPGQPXY

SEQ ID NO: 1954 - protein, 13 aa, synthetic construct
  REGION 1..13: note = Motif
  VARIANT 2: note = X = T, E, K, Q, S, R, G or H
  VARIANT 4: note = X = G, I, V or L
  VARIANT 5: note = X = A, T, K, E, N, S, R or Q
  VARIANT 6: note = X = I, F or L
  VARIANT 8: note = X = N, T, L, A, Y, I, W, V, M, K, R or P
  VARIANT 10: note = X = A, E, or Q
WXWXXXKXGXPMY

SEQ ID NO: 1955 - protein, 13 aa, synthetic construct
  REGION 1..13: note = Motif
  VARIANT 2: note = X = T, E, K, Q, S, R, G or H
  VARIANT 4: note = X = G, I, V or L
  VARIANT 5: note = X = A, T, K, E, N, S, R or Q
  VARIANT 6: note = X = I, F or L
  VARIANT 8: note = X = N, T, L, A, Y, I, W, V, M, K, R or P
WXWXXXKXGQPMY

SEQ ID NO: 1956 - protein, 13 aa, synthetic construct
  REGION 1..13: note = Motif
  VARIANT 2: note = X = T, E, K, Q, S, R, G or H
  VARIANT 4: note = X = G, I, V or L
  VARIANT 5: note = X = A, T, K, E, N, S, R or Q
  VARIANT 6: note = X = I, F or L
  VARIANT 10: note = X = A, E, or Q
WXWXXXKPGXPMY

SEQ ID NO: 1957 - protein, 20 aa, synthetic construct
  REGION 1..20: note = Peptide105+Peptide105
WCTWKGQPCWWCTWKGQPCW

SEQ ID NO: 1958 - protein, 19 aa, synthetic construct
  REGION 1..19: note = Peptide105+Peptide106
WCTWKGQPCWWCGRPGQPC

SEQ ID NO: 1959 - protein, 23 aa, synthetic construct
  REGION 1..23: note = Peptide105+Peptide107
WCTWKGQPCWWHWLQLKPGQPMY

SEQ ID NO: 1960 - protein, 20 aa, synthetic construct
  REGION 1..20: note = Peptide105+Peptide108
WCTWKGQPCWTWQKCWWPGC

SEQ ID NO: 1961 - protein, 20 aa, synthetic construct
  REGION 1..20: note = Peptide105+Peptide109
WCTWKGQPCWPKWTWQGCCW

SEQ ID NO: 1962 - protein, 20 aa, synthetic construct
  REGION 1..20: note = Peptide105+Peptide110
WCTWKGQPCWQTWWPGCKWC

SEQ ID NO: 1963 - protein, 20 aa, synthetic construct
  REGION 1..20: note = Peptide105+Peptide111
WCTWKGQPCWTQWCWWGKCP

SEQ ID NO: 1964 - protein, 19 aa, synthetic construct
  REGION 1..19: note = Peptide105+Peptide112
WCTWKGQPCWCPWCQGGRP

SEQ ID NO: 1965 - protein, 19 aa, synthetic construct
  REGION 1..19: note = Peptide105+Peptide113
WCTWKGQPCWPGPCWRGCQ

SEQ ID NO: 1966 - protein, 19 aa, synthetic construct
  REGION 1..19: note = Peptide105+Peptide114
WCTWKGQPCWGWQCRPPCG

SEQ ID NO: 1967 - protein, 19 aa, synthetic construct
  REGION 1..19: note = Peptide105+Peptide115
WCTWKGQPCWCGQRGPPCW

SEQ ID NO: 1968 - protein, 23 aa, synthetic construct
  REGION 1..23: note = Peptide105+Peptide116
WCTWKGQPCWWKMGQYHQLPPLW

SEQ ID NO: 1969 - protein, 23 aa, synthetic construct
  REGION 1..23: note = Peptide105+Peptide117
WCTWKGQPCWMYGKPHLWQLQWP

SEQ ID NO: 1970 - protein, 23 aa, synthetic construct
  REGION 1..23: note = Peptide105+Peptide118
WCTWKGQPCWQMWPGPWHKQYLL

SEQ ID NO: 1971 - protein, 23 aa, synthetic construct
  REGION 1..23: note = Peptide105+Peptide119
WCTWKGQPCWPGQMKWPHWLLYQ

SEQ ID NO: 1972 - protein, 19 aa, synthetic construct
  REGION 1..19: note = Peptide106+Peptide105
WCGRPGQPCWCTWKGQPCW

SEQ ID NO: 1973 - protein, 18 aa, synthetic construct
  REGION 1..18: note = Peptide106+Peptide106
WCGRPGQPCWCGRPGQPC

SEQ ID NO: 1974 - protein, 22 aa, synthetic construct
  REGION 1..22: note = Peptide106+Peptide107
WCGRPGQPCWHWLQLKPGQPMY

SEQ ID NO: 1975 - protein, 19 aa, synthetic construct
  REGION 1..19: note = Peptide106+Peptide108
WCGRPGQPCTWQKCWWPGC

SEQ ID NO: 1976 - protein, 19 aa, synthetic construct
  REGION 1..19: note = Peptide106+Peptide109
WCGRPGQPCPKWTWQGCCW

SEQ ID NO: 1977 - protein, 19 aa, synthetic construct
  REGION 1..19: note = Peptide106+Peptide110
WCGRPGQPCQTWWPGCKWC

SEQ ID NO: 1978 - protein, 19 aa, synthetic construct
  REGION 1..19: note = Peptide106+Peptide111
WCGRPGQPCTQWCWWGKCP

SEQ ID NO: 1979 - protein, 18 aa, synthetic construct
  REGION 1..18: note = Peptide106+Peptide112
WCGRPGQPCCPWCQGGRP

SEQ ID NO: 1980 - protein, 18 aa, synthetic construct
  REGION 1..18: note = Peptide106+Peptide113
WCGRPGQPCPGPCWRGCQ

SEQ ID NO: 1981 - protein, 18 aa, synthetic construct
  REGION 1..18: note = Peptide106+Peptide114
WCGRPGQPCGWQCRPPCG

SEQ ID NO: 1982 - protein, 18 aa, synthetic construct
  REGION 1..18: note = Peptide106+Peptide115
WCGRPGQPCCGQRGPPCW

SEQ ID NO: 1983 - protein, 22 aa, synthetic construct
  REGION 1..22: note = Peptide106+Peptide116
WCGRPGQPCWKMGQYHQLPPLW

SEQ ID NO: 1984 - protein, 22 aa, synthetic construct
  REGION 1..22: note = Peptide106+Peptide117
WCGRPGQPCMYGKPHLWQLQWP

SEQ ID NO: 1985 - protein, 22 aa, synthetic construct
  REGION 1..22: note = Peptide106+Peptide118
WCGRPGQPCQMWPGPWHKQYLL

SEQ ID NO: 1986 - protein, 22 aa, synthetic construct
  REGION 1..22: note = Peptide106+Peptide119
WCGRPGQPCPGQMKWPHWLLYQ

SEQ ID NO: 1987 - protein, 23 aa, synthetic construct
  REGION 1..23: note = Peptide107+Peptide105
WHWLQLKPGQPMYWCTWKGQPCW

SEQ ID NO: 1988 - protein, 22 aa, synthetic construct
  REGION 1..22: note = Peptide107+Peptide106
WHWLQLKPGQPMYWCGRPGQPC

SEQ ID NO: 1989 - protein, 26 aa, synthetic construct
  REGION 1..26: note = Peptide107+Peptide107
WHWLQLKPGQPMYWHWLQLKPGQPMY

SEQ ID NO: 1990 - protein, 23 aa, synthetic construct
  REGION 1..23: note = Peptide107+Peptide108
WHWLQLKPGQPMYTWQKCWWPGC

SEQ ID NO: 1991 - protein, 23 aa, synthetic construct
  REGION 1..23: note = Peptide107+Peptide109
WHWLQLKPGQPMYPKWTWQGCCW

SEQ ID NO: 1992 - protein, 23 aa, synthetic construct
  REGION 1..23: note = Peptide107+Peptide110
WHWLQLKPGQPMYQTWWPGCKWC

SEQ ID NO: 1993 - protein, 23 aa, synthetic construct
  REGION 1..23: note = Peptide107+Peptide111
WHWLQLKPGQPMYTQWCWWGKCP

SEQ ID NO: 1994 - protein, 22 aa, synthetic construct
  REGION 1..22: note = Peptide107+Peptide112
WHWLQLKPGQPMYCPWCQGGRP

SEQ ID NO: 1995 - protein, 22 aa, synthetic construct
  REGION 1..22: note = Peptide107+Peptide113
WHWLQLKPGQPMYPGPCWRGCQ

SEQ ID NO: 1996 - protein, 22 aa, synthetic construct
  REGION 1..22: note = Peptide107+Peptide114
WHWLQLKPGQPMYGWQCRPPCG

SEQ ID NO: 1997 - protein, 22 aa, synthetic construct
  REGION 1..22: note = Peptide107+Peptide115
WHWLQLKPGQPMYCGQRGPPCW

SEQ ID NO: 1998 - protein, 26 aa, synthetic construct
  REGION 1..26: note = Peptide107+Peptide116
WHWLQLKPGQPMYWKMGQYHQLPPLW

SEQ ID NO: 1999 - protein, 26 aa, synthetic construct
  REGION 1..26: note = Peptide107+Peptide117
WHWLQLKPGQPMYMYGKPHLWQLQWP

SEQ ID NO: 2000 - protein, 26 aa, synthetic construct
  REGION 1..26: note = Peptide107+Peptide118
WHWLQLKPGQPMYQMWPGPWHKQYLL

SEQ ID NO: 2001 - protein, 26 aa, synthetic construct
  REGION 1..26: note = Peptide107+Peptide119
WHWLQLKPGQPMYPGQMKWPHWLLYQ

SEQ ID NO: 2002 - protein, 20 aa, synthetic construct
  REGION 1..20: note = Peptide108+Peptide105
TWQKCWWPGCWCTWKGQPCW

SEQ ID NO: 2003 - protein, 19 aa, synthetic construct
  REGION 1..19: note = Peptide108+Peptide106
TWQKCWWPGCWCGRPGQPC

SEQ ID NO: 2004 - protein, 23 aa, synthetic construct
  REGION 1..23: note = Peptide108+Peptide107
TWQKCWWPGCWHWLQLKPGQPMY

SEQ ID NO: 2005 - protein, 20 aa, synthetic construct
  REGION 1..20: note = Peptide108+Peptide108
TWQKCWWPGCTWQKCWWPGC

SEQ ID NO: 2006 - protein, 20 aa, synthetic construct
  REGION 1..20: note = Peptide108+Peptide109
TWQKCWWPGCPKWTWQGCCW

SEQ ID NO: 2007 - protein, 20 aa, synthetic construct
  REGION 1..20: note = Peptide108+Peptide110
TWQKCWWPGCQTWWPGCKWC

SEQ ID NO: 2008 - protein, 20 aa, synthetic construct
  REGION 1..20: note = Peptide108+Peptide111
TWQKCWWPGCTQWCWWGKCP

SEQ ID NO: 2009 - protein, 19 aa, synthetic construct
  REGION 1..19: note = Peptide108+Peptide112
TWQKCWWPGCCPWCQGGRP

SEQ ID NO: 2010 - protein, 19 aa, synthetic construct
  REGION 1..19: note = Peptide108+Peptide113
TWQKCWWPGCPGPCWRGCQ

SEQ ID NO: 2011 - protein, 19 aa, synthetic construct
  REGION 1..19: note = Peptide108+Peptide114
TWQKCWWPGCGWQCRPPCG

SEQ ID NO: 2012 - protein, 19 aa, synthetic construct
  REGION 1..19: note = Peptide108+Peptide115
TWQKCWWPGCCGQRGPPCW

SEQ ID NO: 2013 - protein, 23 aa, synthetic construct
  REGION 1..23: note = Peptide108+Peptide116
TWQKCWWPGCWKMGQYHQLPPLW

SEQ ID NO: 2014 - protein, 23 aa, synthetic construct
  REGION 1..23: note = Peptide108+Peptide117
TWQKCWWPGCMYGKPHLWQLQWP

SEQ ID NO: 2015 - protein, 23 aa, synthetic construct
  REGION 1..23: note = Peptide108+Peptide118
TWQKCWWPGCQMWPGPWHKQYLL

SEQ ID NO: 2016 - protein, 23 aa, synthetic construct
  REGION 1..23: note = Peptide108+Peptide119
TWQKCWWPGCPGQMKWPHWLLYQ

SEQ ID NO: 2017 - protein, 20 aa, synthetic construct
  REGION 1..20: note = Peptide109+Peptide105
PKWTWQGCCWWCTWKGQPCW

SEQ ID NO: 2018 - protein, 19 aa, synthetic construct
  REGION 1..19: note = Peptide109+Peptide106
PKWTWQGCCWWCGRPGQPC

SEQ ID NO: 2019 - protein, 23 aa, synthetic construct
  REGION 1..23: note = Peptide109+Peptide107
PKWTWQGCCWWHWLQLKPGQPMY

SEQ ID NO: 2020 - protein, 20 aa, synthetic construct
  REGION 1..20: note = Peptide109+Peptide108
PKWTWQGCCWTWQKCWWPGC

SEQ ID NO: 2021 - protein, 20 aa, synthetic construct
  REGION 1..20: note = Peptide109+Peptide109
PKWTWQGCCWPKWTWQGCCW

SEQ ID NO: 2022 - protein, 20 aa, synthetic construct
  REGION 1..20: note = Peptide109+Peptide110
PKWTWQGCCWQTWWPGCKWC

SEQ ID NO: 2023 - protein, 20 aa, synthetic construct
  REGION 1..20: note = Peptide109+Peptide111
PKWTWQGCCWTQWCWWGKCP

SEQ ID NO: 2024 - protein, 19 aa, synthetic construct
  REGION 1..19: note = Peptide109+Peptide112
PKWTWQGCCWCPWCQGGRP

SEQ ID NO: 2025 - protein, 19 aa, synthetic construct
  REGION 1..19: note = Peptide109+Peptide113
PKWTWQGCCWPGPCWRGCQ

SEQ ID NO: 2026 - protein, 19 aa, synthetic construct
  REGION 1..19: note = Peptide109+Peptide114
PKWTWQGCCWGWQCRPPCG

SEQ ID NO: 2027 - protein, 19 aa, synthetic construct
  REGION 1..19: note = Peptide109+Peptide115
PKWTWQGCCWCGQRGPPCW

SEQ ID NO: 2028 - protein, 23 aa, synthetic construct
  REGION 1..23: note = Peptide109+Peptide116
PKWTWQGCCWWKMGQYHQLPPLW

SEQ ID NO: 2029 - protein, 23 aa, synthetic construct
  REGION 1..23: note = Peptide109+Peptide117
PKWTWQGCCWMYGKPHLWQLQWP

SEQ ID NO: 2030 - protein, 23 aa, synthetic construct
  REGION 1..23: note = Peptide109+Peptide118
PKWTWQGCCWQMWPGPWHKQYLL

SEQ ID NO: 2031 - protein, 23 aa, synthetic construct
  REGION 1..23: note = Peptide109+Peptide119
PKWTWQGCCWPGQMKWPHWLLYQ

SEQ ID NO: 2032 - protein, 20 aa, synthetic construct
  REGION 1..20: note = Peptide110+Peptide105
QTWWPGCKWCWCTWKGQPCW

SEQ ID NO: 2033 - protein, 19 aa, synthetic construct
  REGION 1..19: note = Peptide110+Peptide106
QTWWPGCKWCWCGRPGQPC

SEQ ID NO: 2034 - protein, 23 aa, synthetic construct
  REGION 1..23: note = Peptide110+Peptide107
QTWWPGCKWCWHWLQLKPGQPMY

SEQ ID NO: 2035 - protein, 20 aa, synthetic construct
  REGION 1..20: note = Peptide110+Peptide108
QTWWPGCKWCTWQKCWWPGC

SEQ ID NO: 2036 - protein, 20 aa, synthetic construct
  REGION 1..20: note = Peptide110+Peptide109
QTWWPGCKWCPKWTWQGCCW

SEQ ID NO: 2037 - protein, 20 aa, synthetic construct
  REGION 1..20: note = Peptide110+Peptide110
QTWWPGCKWCQTWWPGCKWC

SEQ ID NO: 2038 - protein, 20 aa, synthetic construct
  REGION 1..20: note = Peptide110+Peptide111
QTWWPGCKWCTQWCWWGKCP

SEQ ID NO: 2039 - protein, 19 aa, synthetic construct
  REGION 1..19: note = Peptide110+Peptide112
QTWWPGCKWCCPWCQGGRP

SEQ ID NO: 2040 - protein, 19 aa, synthetic construct
  REGION 1..19: note = Peptide110+Peptide113
QTWWPGCKWCPGPCWRGCQ

SEQ ID NO: 2041 - protein, 19 aa, synthetic construct
  REGION 1..19: note = Peptide110+Peptide114
QTWWPGCKWCGWQCRPPCG

SEQ ID NO: 2042 - protein, 19 aa, synthetic construct
  REGION 1..19: note = Peptide110+Peptide115
QTWWPGCKWCCGQRGPPCW

SEQ ID NO: 2043 - protein, 23 aa, synthetic construct
  REGION 1..23: note = Peptide110+Peptide116
QTWWPGCKWCWKMGQYHQLPPLW

SEQ ID NO: 2044 - protein, 23 aa, synthetic construct
  REGION 1..23: note = Peptide110+Peptide117
QTWWPGCKWCMYGKPHLWQLQWP

SEQ ID NO: 2045 - protein, 23 aa, synthetic construct
  REGION 1..23: note = Peptide110+Peptide118
QTWWPGCKWCQMWPGPWHKQYLL

SEQ ID NO: 2046 - protein, 23 aa, synthetic construct
  REGION 1..23: note = Peptide110+Peptide119
QTWWPGCKWCPGQMKWPHWLLYQ

SEQ ID NO: 2047 - protein, 20 aa, synthetic construct
  REGION 1..20: note = Peptide111+Peptide105
TQWCWWGKCPWCTWKGQPCW

SEQ ID NO: 2048 - protein, 19 aa, synthetic construct
  REGION 1..19: note = Peptide111+Peptide106
TQWCWWGKCPWCGRPGQPC

SEQ ID NO: 2049 - protein, 23 aa, synthetic construct
  REGION 1..23: note = Peptide111+Peptide107
TQWCWWGKCPWHWLQLKPGQPMY

SEQ ID NO: 2050 - protein, 20 aa, synthetic construct
  REGION 1..20: note = Peptide111+Peptide108
TQWCWWGKCPTWQKCWWPGC

SEQ ID NO: 2051 - protein, 20 aa, synthetic construct
  REGION 1..20: note = Peptide111+Peptide109
TQWCWWGKCPPKWTWQGCCW

SEQ ID NO: 2052 - protein, 20 aa, synthetic construct
  REGION 1..20: note = Peptide111+Peptide110
TQWCWWGKCPQTWWPGCKWC

SEQ ID NO: 2053 - protein, 20 aa, synthetic construct
  REGION 1..20: note = Peptide111+Peptide111
TQWCWWGKCPTQWCWWGKCP

SEQ ID NO: 2054 - protein, 19 aa, synthetic construct
  REGION 1..19: note = Peptide111+Peptide112
TQWCWWGKCPCPWCQGGRP

SEQ ID NO: 2055 - protein, 19 aa, synthetic construct
  REGION 1..19: note = Peptide111+Peptide113
TQWCWWGKCPPGPCWRGCQ

SEQ ID NO: 2056 - protein, 19 aa, synthetic construct
  REGION 1..19: note = Peptide111+Peptide114
TQWCWWGKCPGWQCRPPCG

SEQ ID NO: 2057 - protein, 19 aa, synthetic construct
  REGION 1..19: note = Peptide111+Peptide115
TQWCWWGKCPCGQRGPPCW

SEQ ID NO: 2058 - protein, 23 aa, synthetic construct
  REGION 1..23: note = Peptide111+Peptide116
TQWCWWGKCPWKMGQYHQLPPLW

SEQ ID NO: 2059 - protein, 23 aa, synthetic construct
  REGION 1..23: note = Peptide111+Peptide117
TQWCWWGKCPMYGKPHLWQLQWP

SEQ ID NO: 2060 - protein, 23 aa, synthetic construct
  REGION 1..23: note = Peptide111+Peptide118
TQWCWWGKCPQMWPGPWHKQYLL

SEQ ID NO: 2061 - protein, 23 aa, synthetic construct
  REGION 1..23: note = Peptide111+Peptide119
TQWCWWGKCPPGQMKWPHWLLYQ

SEQ ID NO: 2062 - protein, 19 aa, synthetic construct
  REGION 1..19: note = Peptide112+Peptide105
CPWCQGGRPWCTWKGQPCW

SEQ ID NO: 2063 - protein, 18 aa, synthetic construct
  REGION 1..18: note = Peptide112+Peptide106
CPWCQGGRPWCGRPGQPC

SEQ ID NO: 2064 - protein, 22 aa, synthetic construct
  REGION 1..22: note = Peptide112+Peptide107
CPWCQGGRPWHWLQLKPGQPMY

SEQ ID NO: 2065 - protein, 19 aa, synthetic construct
  REGION 1..19: note = Peptide112+Peptide108
CPWCQGGRPTWQKCWWPGC

SEQ ID NO: 2066 - protein, 19 aa, synthetic construct
  REGION 1..19: note = Peptide112+Peptide109
CPWCQGGRPPKWTWQGCCW

SEQ ID NO: 2067 - protein, 19 aa, synthetic construct
  REGION 1..19: note = Peptide112+Peptide110
CPWCQGGRPQTWWPGCKWC

SEQ ID NO: 2068 - protein, 19 aa, synthetic construct
  REGION 1..19: note = Peptide112+Peptide111
CPWCQGGRPTQWCWWGKCP

SEQ ID NO: 2069 - protein, 18 aa, synthetic construct
  REGION 1..18: note = Peptide112+Peptide112
CPWCQGGRPCPWCQGGRP

SEQ ID NO: 2070 - protein, 18 aa, synthetic construct
  REGION 1..18: note = Peptide112+Peptide113
CPWCQGGRPPGPCWRGCQ

SEQ ID NO: 2071 - protein, 18 aa, synthetic construct
  REGION 1..18: note = Peptide112+Peptide114
CPWCQGGRPGWQCRPPCG

SEQ ID NO: 2072 - protein, 18 aa, synthetic construct
  REGION 1..18: note = Peptide112+Peptide115
CPWCQGGRPCGQRGPPCW

SEQ ID NO: 2073 - protein, 22 aa, synthetic construct
  REGION 1..22: note = Peptide112+Peptide116
CPWCQGGRPWKMGQYHQLPPLW

SEQ ID NO: 2074 - protein, 22 aa, synthetic construct
  REGION 1..22: note = Peptide112+Peptide117
CPWCQGGRPMYGKPHLWQLQWP

SEQ ID NO: 2075 - protein, 22 aa, synthetic construct
  REGION 1..22: note = Peptide112+Peptide118
CPWCQGGRPQMWPGPWHKQYLL

SEQ ID NO: 2076 - protein, 22 aa, synthetic construct
  REGION 1..22: note = Peptide112+Peptide119
CPWCQGGRPPGQMKWPHWLLYQ

SEQ ID NO: 2077 - protein, 19 aa, synthetic construct
  REGION 1..19: note = Peptide113+Peptide105
PGPCWRGCQWCTWKGQPCW

SEQ ID NO: 2078 - protein, 18 aa, synthetic construct
  REGION 1..18: note = Peptide113+Peptide106
PGPCWRGCQWCGRPGQPC

SEQ ID NO: 2079 - protein, 22 aa, synthetic construct
  REGION 1..22: note = Peptide113+Peptide107
PGPCWRGCQWHWLQLKPGQPMY

SEQ ID NO: 2080 - protein, 19 aa, synthetic construct
  REGION 1..19: note = Peptide113+Peptide108
PGPCWRGCQTWQKCWWPGC

SEQ ID NO: 2081 - protein, 19 aa, synthetic construct
  REGION 1..19: note = Peptide113+Peptide109
PGPCWRGCQPKWTWQGCCW

SEQ ID NO: 2082 - protein, 19 aa, synthetic construct
  REGION 1..19: note = Peptide113+Peptide110
PGPCWRGCQQTWWPGCKWC

SEQ ID NO: 2083 - protein, 19 aa, synthetic construct
  REGION 1..19: note = Peptide113+Peptide111
PGPCWRGCQTQWCWWGKCP

SEQ ID NO: 2084 - protein, 18 aa, synthetic construct
  REGION 1..18: note = Peptide113+Peptide112
PGPCWRGCQCPWCQGGRP

SEQ ID NO: 2085 - protein, 18 aa, synthetic construct
  REGION 1..18: note = Peptide113+Peptide113
PGPCWRGCQPGPCWRGCQ

SEQ ID NO: 2086 - protein, 18 aa, synthetic construct
  REGION 1..18: note = Peptide113+Peptide114
PGPCWRGCQGWQCRPPCG

SEQ ID NO: 2087 - protein, 18 aa, synthetic construct
  REGION 1..18: note = Peptide113+Peptide115
PGPCWRGCQCGQRGPPCW

SEQ ID NO: 2088 - protein, 22 aa, synthetic construct
  REGION 1..22: note = Peptide113+Peptide116
PGPCWRGCQWKMGQYHQLPPLW

SEQ ID NO: 2089 - protein, 22 aa, synthetic construct
  REGION 1..22: note = Peptide113+Peptide117
PGPCWRGCQMYGKPHLWQLQWP

SEQ ID NO: 2090 - protein, 22 aa, synthetic construct
  REGION 1..22: note = Peptide113+Peptide118
PGPCWRGCQQMWPGPWHKQYLL

SEQ ID NO: 2091 - protein, 22 aa, synthetic construct
  REGION 1..22: note = Peptide113+Peptide119
PGPCWRGCQPGQMKWPHWLLYQ

SEQ ID NO: 2092 - protein, 19 aa, synthetic construct
  REGION 1..19: note = Peptide114+Peptide105
GWQCRPPCGWCTWKGQPCW

SEQ ID NO: 2093 - protein, 18 aa, synthetic construct
  REGION 1..18: note = Peptide114+Peptide106
GWQCRPPCGWCGRPGQPC

SEQ ID NO: 2094 - protein, 22 aa, synthetic construct
  REGION 1..22: note = Peptide114+Peptide107
GWQCRPPCGWHWLQLKPGQPMY

SEQ ID NO: 2095 - protein, 19 aa, synthetic construct
  REGION 1..19: note = Peptide114+Peptide108
GWQCRPPCGTWQKCWWPGC

SEQ ID NO: 2096 - protein, 19 aa, synthetic construct
  REGION 1..19: note = Peptide114+Peptide109
GWQCRPPCGPKWTWQGCCW

SEQ ID NO: 2097 - protein, 19 aa, synthetic construct
  REGION 1..19: note = Peptide114+Peptide110
GWQCRPPCGQTWWPGCKWC

SEQ ID NO: 2098 - protein, 19 aa, synthetic construct
  REGION 1..19: note = Peptide114+Peptide111
GWQCRPPCGTQWCWWGKCP

SEQ ID NO: 2099 - protein, 18 aa, synthetic construct
  REGION 1..18: note = Peptide114+Peptide112
GWQCRPPCGCPWCQGGRP

SEQ ID NO: 2100 - protein, 18 aa, synthetic construct
  REGION 1..18: note = Peptide114+Peptide113
GWQCRPPCGPGPCWRGCQ

SEQ ID NO: 2101 - protein, 18 aa, synthetic construct
  REGION 1..18: note = Peptide114+Peptide114
GWQCRPPCGGWQCRPPCG

SEQ ID NO: 2102 - protein, 18 aa, synthetic construct
  REGION 1..18: note = Peptide114+Peptide115
GWQCRPPCGCGQRGPPCW

SEQ ID NO: 2103 - protein, 22 aa, synthetic construct
  REGION 1..22: note = Peptide114+Peptide116
GWQCRPPCGWKMGQYHQLPPLW

SEQ ID NO: 2104 - protein, 22 aa, synthetic construct
  REGION 1..22: note = Peptide114+Peptide117
GWQCRPPCGMYGKPHLWQLQWP

SEQ ID NO: 2105 - protein, 22 aa, synthetic construct
  REGION 1..22: note = Peptide114+Peptide118
GWQCRPPCGQMWPGPWHKQYLL

SEQ ID NO: 2106 - protein, 22 aa, synthetic construct
  REGION 1..22: note = Peptide114+Peptide119
GWQCRPPCGPGQMKWPHWLLYQ

SEQ ID NO: 2107 - protein, 19 aa, synthetic construct
  REGION 1..19: note = Peptide115+Peptide105
CGQRGPPCWWCTWKGQPCW

SEQ ID NO: 2108 - protein, 18 aa, synthetic construct
  REGION 1..18: note = Peptide115+Peptide106
CGQRGPPCWWCGRPGQPC

SEQ ID NO: 2109 - protein, 22 aa, synthetic construct
  REGION 1..22: note = Peptide115+Peptide107
CGQRGPPCWWHWLQLKPGQPMY

SEQ ID NO: 2110 - protein, 19 aa, synthetic construct
  REGION 1..19: note = Peptide115+Peptide108
CGQRGPPCWTWQKCWWPGC

SEQ ID NO: 2111 - protein, 19 aa, synthetic construct
  REGION 1..19: note = Peptide115+Peptide109
CGQRGPPCWPKWTWQGCCW

SEQ ID NO: 2112 - protein, 19 aa, synthetic construct
  REGION 1..19: note = Peptide115+Peptide110
CGQRGPPCWQTWWPGCKWC

SEQ ID NO: 2113 - protein, 19 aa, synthetic construct
  REGION 1..19: note = Peptide115+Peptide111
CGQRGPPCWTQWCWWGKCP

SEQ ID NO: 2114 - protein, 18 aa, synthetic construct
  REGION 1..18: note = Peptide115+Peptide112
CGQRGPPCWCPWCQGGRP

SEQ ID NO: 2115 - protein, 18 aa, synthetic construct
  REGION 1..18: note = Peptide115+Peptide113
CGQRGPPCWPGPCWRGCQ

SEQ ID NO: 2116 - protein, 18 aa, synthetic construct
  REGION 1..18: note = Peptide115+Peptide114
CGQRGPPCWGWQCRPPCG

SEQ ID NO: 2117 - protein, 18 aa, synthetic construct
  REGION 1..18: note = Peptide115+Peptide115
CGQRGPPCWCGQRGPPCW

SEQ ID NO: 2118 - protein, 22 aa, synthetic construct
  REGION 1..22: note = Peptide115+Peptide116
CGQRGPPCWWKMGQYHQLPPLW

SEQ ID NO: 2119 - protein, 22 aa, synthetic construct
  REGION 1..22: note = Peptide115+Peptide117
CGQRGPPCWMYGKPHLWQLQWP

SEQ ID NO: 2120 - protein, 22 aa, synthetic construct
  REGION 1..22: note = Peptide115+Peptide118
CGQRGPPCWQMWPGPWHKQYLL

SEQ ID NO: 2121 - protein, 22 aa, synthetic construct
  REGION 1..22: note = Peptide115+Peptide119
CGQRGPPCWPGQMKWPHWLLYQ

SEQ ID NO: 2122 - protein, 23 aa, synthetic construct
  REGION 1..23: note = Peptide116+Peptide105
WKMGQYHQLPPLWWCTWKGQPCW

SEQ ID NO: 2123 - protein, 22 aa, synthetic construct
  REGION 1..22: note = Peptide116+Peptide106
WKMGQYHQLPPLWWCGRPGQPC

SEQ ID NO: 2124 - protein, 26 aa, synthetic construct
  REGION 1..26: note = Peptide116+Peptide107
WKMGQYHQLPPLWWHWLQLKPGQPMY

SEQ ID NO: 2125 - protein, 23 aa, synthetic construct
  REGION 1..23: note = Peptide116+Peptide108
WKMGQYHQLPPLWTWQKCWWPGC

SEQ ID NO: 2126 - protein, 23 aa, synthetic construct
  REGION 1..23: note = Peptide116+Peptide109
WKMGQYHQLPPLWPKWTWQGCCW

SEQ ID NO: 2127 - protein, 23 aa, synthetic construct
  REGION 1..23: note = Peptide116+Peptide110
WKMGQYHQLPPLWQTWWPGCKWC

SEQ ID NO: 2128 - protein, 23 aa, synthetic construct
  REGION 1..23: note = Peptide116+Peptide111
WKMGQYHQLPPLWTQWCWWGKCP

SEQ ID NO: 2129 - protein, 22 aa, synthetic construct
  REGION 1..22: note = Peptide116+Peptide112
WKMGQYHQLPPLWCPWCQGGRP

SEQ ID NO: 2130 - protein, 22 aa, synthetic construct
  REGION 1..22: note = Peptide116+Peptide113
WKMGQYHQLPPLWPGPCWRGCQ

SEQ ID NO: 2131 - protein, 22 aa, synthetic construct
  REGION 1..22: note = Peptide116+Peptide114
WKMGQYHQLPPLWGWQCRPPCG

SEQ ID NO: 2132 - protein, 22 aa, synthetic construct
  REGION 1..22: note = Peptide116+Peptide115
WKMGQYHQLPPLWCGQRGPPCW

SEQ ID NO: 2133 - protein, 26 aa, synthetic construct
  REGION 1..26: note = Peptide116+Peptide116
WKMGQYHQLPPLWWKMGQYHQLPPLW

SEQ ID NO: 2134 - protein, 26 aa, synthetic construct
  REGION 1..26: note = Peptide116+Peptide117
WKMGQYHQLPPLWMYGKPHLWQLQWP

SEQ ID NO: 2135 - protein, 26 aa, synthetic construct
  REGION 1..26: note = Peptide116+Peptide118
WKMGQYHQLPPLWQMWPGPWHKQYLL

SEQ ID NO: 2136 - protein, 26 aa, synthetic construct
  REGION 1..26: note = Peptide116+Peptide119
WKMGQYHQLPPLWPGQMKWPHWLLYQ

SEQ ID NO: 2137 - protein, 23 aa, synthetic construct
  REGION 1..23: note = Peptide117+Peptide105
MYGKPHLWQLQWPWCTWKGQPCW

SEQ ID NO: 2138 - protein, 22 aa, synthetic construct
  REGION 1..22: note = Peptide117+Peptide106
MYGKPHLWQLQWPWCGRPGQPC

SEQ ID NO: 2139 - protein, 26 aa, synthetic construct
  REGION 1..26: note = Peptide117+Peptide107
MYGKPHLWQLQWPWHWLQLKPGQPMY

SEQ ID NO: 2140 - protein, 23 aa, synthetic construct
  REGION 1..23: note = Peptide117+Peptide108
MYGKPHLWQLQWPTWQKCWWPGC

SEQ ID NO: 2141 - protein, 23 aa, synthetic construct
  REGION 1..23: note = Peptide117+Peptide109
MYGKPHLWQLQWPPKWTWQGCCW

SEQ ID NO: 2142 - protein, 23 aa, synthetic construct
  REGION 1..23: note = Peptide117+Peptide110
MYGKPHLWQLQWPQTWWPGCKWC

SEQ ID NO: 2143 - protein, 23 aa, synthetic construct
  REGION 1..23: note = Peptide117+Peptide111
MYGKPHLWQLQWPTQWCWWGKCP

SEQ ID NO: 2144 - protein, 22 aa, synthetic construct
  REGION 1..22: note = Peptide117+Peptide112
MYGKPHLWQLQWPCPWCQGGRP

SEQ ID NO: 2145 - protein, 22 aa, synthetic construct
  REGION 1..22: note = Peptide117+Peptide113
MYGKPHLWQLQWPPGPCWRGCQ

SEQ ID NO: 2146 - protein, 22 aa, synthetic construct
  REGION 1..22: note = Peptide117+Peptide114
MYGKPHLWQLQWPGWQCRPPCG

SEQ ID NO: 2147 - protein, 22 aa, synthetic construct
  REGION 1..22: note = Peptide117+Peptide115
MYGKPHLWQLQWPCGQRGPPCW

SEQ ID NO: 2148 - protein, 26 aa, synthetic construct
  REGION 1..26: note = Peptide117+Peptide116
MYGKPHLWQLQWPWKMGQYHQLPPLW

SEQ ID NO: 2149 - protein, 26 aa, synthetic construct
  REGION 1..26: note = Peptide117+Peptide117
MYGKPHLWQLQWPMYGKPHLWQLQWP

SEQ ID NO: 2150 - protein, 26 aa, synthetic construct
  REGION 1..26: note = Peptide117+Peptide118
MYGKPHLWQLQWPQMWPGPWHKQYLL

SEQ ID NO: 2151 - protein, 26 aa, synthetic construct
  REGION 1..26: note = Peptide117+Peptide119
MYGKPHLWQLQWPPGQMKWPHWLLYQ

SEQ ID NO: 2152 - protein, 23 aa, synthetic construct
  REGION 1..23: note = Peptide118+Peptide105
QMWPGPWHKQYLLWCTWKGQPCW

SEQ ID NO: 2153 - protein, 22 aa, synthetic construct
  REGION 1..22: note = Peptide118+Peptide106
QMWPGPWHKQYLLWCGRPGQPC

SEQ ID NO: 2154 - protein, 26 aa, synthetic construct
  REGION 1..26: note = Peptide118+Peptide107
QMWPGPWHKQYLLWHWLQLKPGQPMY

SEQ ID NO: 2155 - protein, 23 aa, synthetic construct
  REGION 1..23: note = Peptide118+Peptide108
QMWPGPWHKQYLLTWQKCWWPGC

SEQ ID NO: 2156 - protein, 23 aa, synthetic construct
  REGION 1..23: note = Peptide118+Peptide109
QMWPGPWHKQYLLPKWTWQGCCW

SEQ ID NO: 2157 - protein, 23 aa, synthetic construct
  REGION 1..23: note = Peptide118+Peptide110
QMWPGPWHKQYLLQTWWPGCKWC

SEQ ID NO: 2158 - protein, 23 aa, synthetic construct
  REGION 1..23: note = Peptide118+Peptide111
QMWPGPWHKQYLLTQWCWWGKCP

SEQ ID NO: 2159 - protein, 22 aa, synthetic construct
  REGION 1..22: note = Peptide118+Peptide112
QMWPGPWHKQYLLCPWCQGGRP

SEQ ID NO: 2160 - protein, 22 aa, synthetic construct
  REGION 1..22: note = Peptide118+Peptide113
QMWPGPWHKQYLLPGPCWRGCQ

SEQ ID NO: 2161 - protein, 22 aa, synthetic construct
  REGION 1..22: note = Peptide118+Peptide114
QMWPGPWHKQYLLGWQCRPPCG

SEQ ID NO: 2162 - protein, 22 aa, synthetic construct
  REGION 1..22: note = Peptide118+Peptide115
QMWPGPWHKQYLLCGQRGPPCW

SEQ ID NO: 2163 - protein, 26 aa, synthetic construct
  REGION 1..26: note = Peptide118+Peptide116
QMWPGPWHKQYLLWKMGQYHQLPPLW

SEQ ID NO: 2164 - protein, 26 aa, synthetic construct
  REGION 1..26: note = Peptide118+Peptide117
QMWPGPWHKQYLLMYGKPHLWQLQWP

SEQ ID NO: 2165 - protein, 26 aa, synthetic construct
  REGION 1..26: note = Peptide118+Peptide118
QMWPGPWHKQYLLQMWPGPWHKQYLL

SEQ ID NO: 2166 - protein, 26 aa, synthetic construct
  REGION 1..26: note = Peptide118+Peptide119
QMWPGPWHKQYLLPGQMKWPHWLLYQ

SEQ ID NO: 2167 - protein, 23 aa, synthetic construct
  REGION 1..23: note = Peptide119+Peptide105
PGQMKWPHWLLYQWCTWKGQPCW

SEQ ID NO: 2168 - protein, 22 aa, synthetic construct
  REGION 1..22: note = Peptide119+Peptide106
PGQMKWPHWLLYQWCGRPGQPC

SEQ ID NO: 2169 - protein, 26 aa, synthetic construct
  REGION 1..26: note = Peptide119+Peptide107
PGQMKWPHWLLYQWHWLQLKPGQPMY

SEQ ID NO: 2170 - protein, 23 aa, synthetic construct
  REGION 1..23: note = Peptide119+Peptide108
PGQMKWPHWLLYQTWQKCWWPGC

SEQ ID NO: 2171 - protein, 23 aa, synthetic construct
  REGION 1..23: note = Peptide119+Peptide109
PGQMKWPHWLLYQPKWTWQGCCW

SEQ ID NO: 2172 - protein, 23 aa, synthetic construct
  REGION 1..23: note = Peptide119+Peptide110
PGQMKWPHWLLYQQTWWPGCKWC

SEQ ID NO: 2173 - protein, 23 aa, synthetic construct
  REGION 1..23: note = Peptide119+Peptide111
PGQMKWPHWLLYQTQWCWWGKCP

SEQ ID NO: 2174 - protein, 22 aa, synthetic construct
  REGION 1..22: note = Peptide119+Peptide112
PGQMKWPHWLLYQCPWCQGGRP

SEQ ID NO: 2175 - protein, 22 aa, synthetic construct
  REGION 1..22: note = Peptide119+Peptide113
PGQMKWPHWLLYQPGPCWRGCQ

SEQ ID NO: 2176 - protein, 22 aa, synthetic construct
  REGION 1..22: note = Peptide119+Peptide114
PGQMKWPHWLLYQGWQCRPPCG

SEQ ID NO: 2177 - protein, 22 aa, synthetic construct
  REGION 1..22: note = Peptide119+Peptide115
PGQMKWPHWLLYQCGQRGPPCW

SEQ ID NO: 2178 - protein, 26 aa, synthetic construct
  REGION 1..26: note = Peptide119+Peptide116
PGQMKWPHWLLYQWKMGQYHQLPPLW

SEQ ID NO: 2179 - protein, 26 aa, synthetic construct
  REGION 1..26: note = Peptide119+Peptide117
PGQMKWPHWLLYQMYGKPHLWQLQWP

SEQ ID NO: 2180 - protein, 26 aa, synthetic construct
  REGION 1..26: note = Peptide119+Peptide118
PGQMKWPHWLLYQQMWPGPWHKQYLL

SEQ ID NO: 2181 - protein, 26 aa, synthetic construct
  REGION 1..26: note = Peptide119+Peptide119
PGQMKWPHWLLYQPGQMKWPHWLLYQ

SEQ ID NO: 2182 - protein, 10 aa, unidentified
  REGION 1..10: note = Fusarium spp.
WCTWKGQPCW

SEQ ID NO: 2183 - protein, 9 aa, unidentified
  REGION 1..9: note = Botrytis spp.
WCGRPGQPC

SEQ ID NO: 2184 - protein, 13 aa, Saccharomyces cerevisiae
WHWLQLKPGQPMY

SEQ ID NO: 2185 - protein, 13 aa, synthetic construct
  REGION 1..13: note = Synthetic Construct
WKMGQYHQLPPLW

SEQ ID NO: 2186 - protein, 14 aa, Saccharomyces cerevisiae
WHWLQLKPGQPMYG

SEQ ID NO: 2187 - protein, 14 aa, Saccharomyces cerevisiae
GWHWLQLKPGQPMY

SEQ ID NO: 2188 - protein, 26 aa, Saccharomyces cerevisiae
WHWLQLKPGQPMYWHWLQLKPGQPMY

SEQ ID NO: 2189 - protein, 31 aa, Saccharomyces cerevisiae
WHWLQLKPGQPMYGGGGSWHWLQLKPGQPMY

SEQ ID NO: 2190-2193 - skipped (4 entries)

SEQ ID NO: 2194 - protein, 8 aa, synthetic construct
  REGION 1..8: note = Synthetic Construct
  VARIANT 1: note = Can be present in repeats of 0-1
  VARIANT 2..5: note = Can be present in repeats of 3-10
MYEYKYEY

SEQ ID NO: 2195 - protein, 21 aa, synthetic construct
  REGION 1..21: note = Synthetic Construct
MVKVKCYVLFTALLSSLCAYG

SEQ ID NO: 2196-2198 - skipped (3 entries)

SEQ ID NO: 2199 - protein, 10 aa, Fusarium graminearum
TWQKCWWPGC

SEQ ID NO: 2200 - protein, 10 aa, Fusarium graminearum
PKWTWQGCCW

SEQ ID NO: 2201 - protein, 10 aa, Fusarium graminearum
QTWWPGCKWC

SEQ ID NO: 2202 - protein, 10 aa, Fusarium graminearum
TQWCWWGKCP

SEQ ID NO: 2203 - protein, 9 aa, Botrytis cinerea
CPWCQGGRP

SEQ ID NO: 2204 - protein, 9 aa, Botrytis cinerea
PGPCWRGCQ

SEQ ID NO: 2205 - protein, 9 aa, Botrytis cinerea
GWQCRPPCG

SEQ ID NO: 2206 - protein, 9 aa, Botrytis cinerea
CGQRGPPCW

SEQ ID NO: 2207 - skipped

SEQ ID NO: 2208 - protein, 13 aa, Saccharomyces cerevisiae
MYGKPHLWQLQWP

SEQ ID NO: 2209 - protein, 13 aa, Saccharomyces cerevisiae
QMWPGPWHKQYLL

SEQ ID NO: 2210 - protein, 13 aa, Saccharomyces cerevisiae
PGQMKWPHWLLYQ

SEQ ID NO: 2211-2230 - skipped (20 entries)

SEQ ID NO: 2231 - protein, 23 aa, synthetic construct
  REGION 1..23: note = Synthetic Construct
WHWLQLKPGQPMYWCTWKGQPCW

SEQ ID NO: 2232 - protein, 27 aa, synthetic construct
  REGION 1..27: note = Synthetic Construct
WHWLQLKPGQPMYGGGGWCTWKGQPCW

SEQ ID NO: 2233 - protein, 23 aa, synthetic construct
  REGION 1..23: note = Synthetic Construct
WCTWKGQPCWWHWLQLKPGQPMY

SEQ ID NO: 2234 - protein, 27 aa, synthetic construct
  REGION 1..27: note = Synthetic Construct
WCTWKGQPCWGGGGWHWLQLKPGQPMY

SEQ ID NO: 2235 - protein, 22 aa, synthetic construct
  REGION 1..22: note = Synthetic Construct
WHWLQLKPGQPMYWCGRPGQPC

SEQ ID NO: 2236 - protein, 26 aa, synthetic construct
  REGION 1..26: note = Synthetic Construct
WHWLQLKPGQPMYGGGGWCGRPGQPC

SEQ ID NO: 2237 - protein, 19 aa, synthetic construct
  REGION 1..19: note = Synthetic Construct
WCTWKGQPCWWCGRPGQPC

SEQ ID NO: 2238 - protein, 23 aa, synthetic construct
  REGION 1..23: note = Synthetic Construct
WCTWKGQPCWGGGGWCGRPGQPC

SEQ ID NO: 2239 - protein, 34 aa, synthetic construct
  REGION 1..34: note = Synthetic Construct
MVKVKCYVLFTALLSSLCAYGWHWLQLKPGQPMY

SEQ ID NO: 2240 - protein, 21 aa, synthetic construct
  REGION 1..21: note = Synthetic Construct
WHWLQLKPGQPMYRRRRRRRR

SEQ ID NO: 2241 - protein, 28 aa, synthetic construct
  REGION 1..28: note = Synthetic Construct
YEYKYEYKYEYKYEYWHWLQLKPGQPMY

SEQ ID NO: 2242 - protein, 29 aa, synthetic construct
  REGION 1..29: note = Synthetic Construct
MYEYKYEYKYEYKYEYWHWLQLKPGQPMY

SEQ ID NO: 2243 - protein, 35 aa, synthetic construct
  REGION 1..35: note = Synthetic Construct
WHWLQLKPGQPMYGGGGWCTWKGQPCWRRRRRRRR

SEQ ID NO: 2244 - DNA, 48 bp, synthetic construct
  misc_feature 1..48: note = T7 terminator
  source 1..48: mol_type = other DNA
ctagcataaccccttggggcctctaaacgggtcttgaggggttttttg

SEQ ID NO: 2245 - DNA, 19 bp, synthetic construct
  misc_feature 1..19: note = T7 promoter
  source 1..19: mol_type = other DNA
taatacgactcactatagg

SEQ ID NO: 2246 - DNA, 18 bp, synthetic construct
  misc_feature 1..18: note = 6x His Tag
  source 1..18: mol_type = other DNA
catcatcatcatcatcac

SEQ ID NO: 2247 - DNA, 21 bp, synthetic construct
  misc_feature 1..21: note = TEV cleavage site
  source 1..21: mol_type = other DNA
gaaaacttgtatttccagggc

SEQ ID NO: 2248 - DNA, 39 bp, synthetic construct
  misc_feature 1..39: note = S. cerevisiae Alpha-pheromone (pep 107)
  source 1..39: mol_type = other DNA
tggcattggctgcagctgaaaccgggccagccgatgtat

SEQ ID NO: 2249 - DNA, 157 bp, synthetic construct
  misc_feature 1..157: note = CGI Construct
  source 1..157: mol_type = other DNA
taatacgactcactataggcatcatcatcatcatcacagcagcggcagagaaaacttgtatttccagggctggcattggctgcagctgaaaccgggccagccgatgtatctagcataaccccttggggcctctaaacgggtcttgaggggttttttg

SEQ ID NO: 2250 - DNA, 30 bp, synthetic construct
  misc_feature 1..30: note = Botrytis cinerea Alpha-pheromone (pep 106)
  source 1..30: mol_type = other DNA
tggtgcggccgcccgggccagccgtgctaa

SEQ ID NO: 2251 - skipped

SEQ ID NO: 2252 - DNA, 15 bp, synthetic construct
  misc_feature 1..15: note = Translation Initiation Region (TIR)
  source 1..15: mol_type = other DNA
tcgaggatggctcag

SEQ ID NO: 2253 - protein, 13 aa, Aaosphaeria arxii
  source 1..13: note = CBS 175.79
CGMPGQPCDRLKR

SEQ ID NO: 2254 - protein, 13 aa, Aaosphaeria arxii
  source 1..13: note = CBS 175.79
CLFVGQSCSVAKR

SEQ ID NO: 2255 - protein, 13 aa, Aaosphaeria arxii
  source 1..13: note = CBS 175.79
CRWPGQPCSKDKR

SEQ ID NO: 2256 - protein, 13 aa, Aaosphaeria arxii
  source 1..13: note = CBS 175.79
CRWPGQPCSKEKR

SEQ ID NO: 2257 - protein, 13 aa, Aaosphaeria arxii
  source 1..13: note = CBS 175.79
CRWPGQPCSKKRE

SEQ ID NO: 2258 - protein, 13 aa, Aaosphaeria arxii
  source 1..13: note = CBS 175.79
CTFGDSVCSKIKR

SEQ ID NO: 2259 - protein, 13 aa, Acremonium chrysogenum
  source 1..13: note = ATCC 11550
CHRPGGECFKAKR

SEQ ID NO: 2260 - protein, 14 aa, Acremonium chrysogenum
  source 1..14: note = ATCC 11550
WCYIETYDCPRAKR

SEQ ID NO: 2261 - protein, 14 aa, Akanthomyces lecanii
  source 1..14: note = RCEF 1005
WCMRPAQPCWKLKR

SEQ ID NO: 2262 - protein, 14 aa, Akanthomyces lecanii
  source 1..14: note = RCEF 1005
WCMRPAQPCWKTRR

SEQ ID NO: 2263 - protein, 14 aa, Amniculicola lignicola
  source 1..14: note = CBS 123094
WCRFPGQPCGKAKR

SEQ ID NO: 2264 - protein, 14 aa, Amniculicola lignicola
  source 1..14: note = CBS 123094
WCRFPGQPCGKDKR

SEQ ID NO: 2265 - protein, 14 aa, Amniculicola lignicola
  source 1..14: note = CBS 123094
WCRFPGQPCGKNKR

SEQ ID NO: 2266 - protein, 13 aa, Amorphotheca resinae
  source 1..13: note = ATCC 22711
CGKVGQPCGKAKR

SEQ ID NO: 2267 - protein, 13 aa, Amorphotheca resinae
  source 1..13: note = ATCC 22711
CGKVGQPCGKIKR

SEQ ID NO: 2268 - protein, 13 aa, Amorphotheca resinae
  source 1..13: note = ATCC 22711
CNLVGGACYEAKR

SEQ ID NO: 2269 - protein, 25 aa, Amorphotheca resinae
  source 1..25: note = ATCC 22711
LALPLPEAYAEAKCGEFGECGRVKR

SEQ ID NO: 2270 - protein, 21 aa, Aplosporella prunicola
  source 1..21: note = CBS 121167
WKAPWPRFCFRPGQPCTKAKR

SEQ ID NO: 2271 - protein, 21 aa, Aplosporella prunicola
  source 1..21: note = CBS 121167
WKAPWPRFCFRPGQPCTKVKR

SEQ ID NO: 2272 - protein, 17 aa, Aplosporella prunicola
  source 1..17: note = CBS 121167
WPRFCFRPGQPCTKAKR

SEQ ID NO: 2273 - protein, 14 aa, Aspergillus aculeatinus
  source 1..14: note = CBS 121060
WCYLPGQPCAMMKR

SEQ ID NO: 2274 - protein, 14 aa, Aspergillus aculeatinus
  source 1..14: note = CBS 121060
WCYLPGQPCQKIKR

SEQ ID NO: 2275 - protein, 14 aa, Aspergillus aculeatus
  source 1..14: note = ATCC 16872
WCYLPGQPCAMIKR

SEQ ID NO: 2276 - protein, 14 aa, Aspergillus aculeatus
  source 1..14: note = ATCC 16872
WCYLPGQPCQKIKR

SEQ ID NO: 2277 - protein, 14 aa, Aspergillus alliaceus
RCTGLAQGCYMLKR

SEQ ID NO: 2278 - protein, 14 aa, Aspergillus alliaceus
WCHLPGQGCLKFKR

SEQ ID NO: 2279 - protein, 14 aa, Aspergillus alliaceus
RCTGLAQGCYMLKR

SEQ ID NO: 2280 - protein, 14 aa, Aspergillus alliaceus
WCHLPGQGCLKFKR

SEQ ID NO: 2281 - protein, 14 aa, Aspergillus arachidicola
WCALPAQGCYMLKR

SEQ ID NO: 2282 - protein, 14 aa, Aspergillus arachidicola
WCALPGQGCLKAKR

SEQ ID NO: 2283 - protein, 14 aa, Aspergillus avenaceus
WCHGPGQGCYKVKR

SEQ ID NO: 2284 - protein, 14 aa, Aspergillus avenaceus
WCHGPGQGCYMFKR

SEQ ID NO: 2285 - protein, 14 aa, Aspergillus awamori
WCVLPGQPCNKIKR

SEQ ID NO: 2286 - protein, 14 aa, Aspergillus awamori
WCVLPGQPCNMIKR

SEQ ID NO: 2287 - protein, 14 aa, Aspergillus bertholletiae
WCALPGQGCLKAKR

SEQ ID NO: 2288 - protein, 14 aa, Aspergillus bertholletiae
WCALPGQGCYMLKR

SEQ ID NO: 2289 - protein, 14 aa, Aspergillus bombycis
WCALPAQGCYMLKR

SEQ ID NO: 2290 - protein, 14 aa, Aspergillus bombycis
WCALPGQGCLKAKR

SEQ ID NO: 2291 - protein, 14 aa, Aspergillus brasiliensis
  source 1..14: note = CBS 101740
WCVLPGQPCNKIKR

SEQ ID NO: 2292 - protein, 14 aa, Aspergillus brasiliensis
  source 1..14: note = CBS 101740
WCVLPGQPCNMIKR

SEQ ID NO: 2293 - protein, 14 aa, Aspergillus brunneoviolaceus
  source 1..14: note = CBS 621.78
WCYLPGQPCAMMKR

SEQ ID NO: 2294 - protein, 14 aa, Aspergillus brunneoviolaceus
  source 1..14: note = CBS 621.78
WCYLPGQPCQKIKR

SEQ ID NO: 2295 - protein, 14 aa, Aspergillus campestris
  source 1..14: note = IBT 28561
WCHFPGQGCQKAKR

SEQ ID NO: 2296 - protein, 14 aa, Aspergillus campestris
  source 1..14: note = IBT 28561
WCHFPGQGCYMLKR

SEQ ID NO: 2297 - protein, 14 aa, Aspergillus candidus
WCHFPGQGCQKAKR

SEQ ID NO: 2298 - protein, 14 aa, Aspergillus candidus
WCHFPGQGCYMLKR

SEQ ID NO: 2299 - protein, 14 aa, Aspergillus carbonarius
  source 1..14: note = ITEM 5010
WCNLPGQPCNKIKR

SEQ ID NO: 2300 - protein, 14 aa, Aspergillus carbonarius
  source 1..14: note = ITEM 5010
WCNLPGQPCNMIKR

SEQ ID NO: 2301 - protein, 14 aa, Aspergillus carbonarius
  source 1..14: note = ITEM 5010
WCNLPGQPCNKIKR

SEQ ID NO: 2302 - protein, 14 aa, Aspergillus carbonarius
  source 1..14: note = ITEM 5010
WCNLPGQPCNMIKR

SEQ ID NO: 2303 - protein, 14 aa, Aspergillus clavatus
  source 1..14: note = NRRL 1
WCELPGQGCHKVKR

SEQ ID NO: 2304 - protein, 14 aa, Aspergillus clavatus
  source 1..14: note = NRRL 1
WCELPGQGCYMIKR

SEQ ID NO: 2305 - protein, 14 aa, Aspergillus coremiiformis
WCNGPGQGCYMFKR

SEQ ID NO: 2306 - protein, 14 aa, Aspergillus coremiiformis
WCRLPGQGCLKVKR

SEQ ID NO: 2307 - protein, 14 aa, Aspergillus costaricaensis
  source 1..14: note = CBS 115574
WCHLPGQPCNMIKR

SEQ ID NO: 2308 - protein, 14 aa, Aspergillus costaricaensis
  source 1..14: note = CBS 115574
WCVLPGQPCNKIKR

SEQ ID NO: 2309 - protein, 14 aa, Aspergillus ellipticus
  source 1..14: note = CBS 707.79
WCVLPGQPCNKIKR

SEQ ID NO: 2310 - protein, 14 aa, Aspergillus ellipticus
  source 1..14: note = CBS 707.79
WCVLPGQPCNKMKR

SEQ ID NO: 2311 - protein, 14 aa, Aspergillus eucalypticola
  source 1..14: note = CBS 122712
WCVLPGQPCNKIKR

SEQ ID NO: 2312 - protein, 14 aa, Aspergillus eucalypticola
  source 1..14: note = CBS 122712
WCYLPGQPCNMIKR

SEQ ID NO: 2313 - protein, 14 aa, Aspergillus fijiensis
  source 1..14: note = CBS 313.89
WCYLPGQPCAMMKR

SEQ ID NO: 2314 - protein, 14 aa, Aspergillus fijiensis
  source 1..14: note = CBS 313.89
WCYLPGQPCQKIKR

SEQ ID NO: 2315 - protein, 14 aa, Aspergillus fischeri
  source 1..14: note = NRRL 181
WCHLPGQGCAKAKR

SEQ ID NO: 2316 - protein, 14 aa, Aspergillus fischeri
  source 1..14: note = NRRL 181
WCHLPGQGCYMLKR

SEQ ID NO: 2317 - protein, 14 aa, Aspergillus flavus
WCALPGQGCLKAKR

SEQ ID NO: 2318 - protein, 14 aa, Aspergillus flavus
WCSLPAQGCYMLKR

SEQ ID NO: 2319 - protein, 14 aa, Aspergillus flavus
WCALPGQGCLKAKR

SEQ ID NO: 2320 - protein, 14 aa, Aspergillus flavus
WCSLPAQGCYMLKR

SEQ ID NO: 2321 - protein, 14 aa, Aspergillus flavus
WCALPGQGCLKAKR

SEQ ID NO: 2322 - protein, 14 aa, Aspergillus flavus
WCSLPAQGCYMLKR

SEQ ID NO: 2323 - protein, 14 aa, Aspergillus flavus
WCALPGQGCLKAKR

SEQ ID NO: 2324 - protein, 14 aa, Aspergillus flavus
WCSLPAQGCYMLKR

SEQ ID NO: 2325 - protein, 14 aa, Aspergillus flavus
WCALPGQGCLKAKR

SEQ ID NO: 2326 - protein, 14 aa, Aspergillus flavus
WCSLPAQGCYMLKR

SEQ ID NO: 2327 - protein, 14 aa, Aspergillus flavus
WCALPGQGCLKAKR

SEQ ID NO: 2328 - protein, 14 aa, Aspergillus flavus
WCSLPAQGCYMLKR

SEQ ID NO: 2329 - protein, 14 aa, Aspergillus fumigatiaffinis
WCHLPGQGCAKAKR

SEQ ID NO: 2330 - protein, 14 aa, Aspergillus fumigatiaffinis
WCHLPGQGCYMLKR

SEQ ID NO: 2331 - protein, 14 aa, Aspergillus fumigatiaffinis
WCHLPGQGCAKAKR

SEQ ID NO: 2332 - protein, 14 aa, Aspergillus fumigatiaffinis
WCHLPGQGCYMLKR

SEQ ID NO: 2333 - protein, 14 aa, Aspergillus fumigatiaffinis
WCHLPGQGCAKAKR

SEQ ID NO: 2334 - protein, 14 aa, Aspergillus fumigatiaffinis
WCHLPGQGCYMLKR

SEQ ID NO: 2335 - protein, 14 aa, Aspergillus fumigatiaffinis
WCHLPGQGCAKAKR

SEQ ID NO: 2336 - protein, 14 aa, Aspergillus fumigatiaffinis
WCHLPGQGCYMLKR

SEQ ID NO: 2337 - protein, 14 aa, Aspergillus fumigatus
WCHLPGQGCAKAKR

SEQ ID NO: 2338 - protein, 14 aa, Aspergillus fumigatus
WCHLPGQGCYMLKR

SEQ ID NO: 2339 - protein, 14 aa, Aspergillus fumigatus
WCHLPGQGCAKAKR

SEQ ID NO: 2340 - protein, 14 aa, Aspergillus fumigatus
WCHLPGQGCYMLKR

SEQ ID NO: 2341 - protein, 14 aa, Aspergillus fumigatus
WCHLPGQGCAKAKR

SEQ ID NO: 2342 - protein, 14 aa, Aspergillus fumigatus
WCHLPGQGCYMLKR

SEQ ID NO: 2343 - protein, 14 aa, Aspergillus fumigatus
WCHLPGQGCAKAKR

SEQ ID NO: 2344 - protein, 14 aa, Aspergillus fumigatus
WCHLPGQGCYMLKR

SEQ ID NO: 2345 - protein, 14 aa, Aspergillus fumigatus
WCHLPGQGCAKAKR

SEQ ID NO: 2346 - protein, 14 aa, Aspergillus fumigatus
WCHLPGQGCYMLKR

SEQ ID NO: 2347 - protein, 14 aa, Aspergillus fumigatus
WCHLPGQGCAKAKR

SEQ ID NO: 2348 - protein, 14 aa, Aspergillus fumigatus
WCHLPGQGCYMLKR

SEQ ID NO: 2349 - protein, 14 aa, Aspergillus fumigatus
WCHLPGQGCAKAKR

SEQ ID NO: 2350 - protein, 14 aa, Aspergillus fumigatus
WCHLPGQGCYMLKR

SEQ ID NO: 2351 - protein, 14 aa, Aspergillus fumigatus
WCHLPGQGCAKAKR

SEQ ID NO: 2352 - protein, 14 aa, Aspergillus fumigatus
WCHLPGQGCYMLKR

SEQ ID NO: 2353 - protein, 14 aa, Aspergillus fumigatus
WCHLPGQGCAKAKR

SEQ ID NO: 2354 - protein, 14 aa, Aspergillus fumigatus
WCHLPGQGCYMLKR

SEQ ID NO: 2355 - protein, 14 aa, Aspergillus fumigatus
WCHLPGQGCAKAKR

SEQ ID NO: 2356 - protein, 14 aa, Aspergillus fumigatus
WCHLPGQGCYMLKR

SEQ ID NO: 2357 - protein, 14 aa, Aspergillus fumigatus
WCHLPGQGCAKAKR

SEQ ID NO: 2358 - protein, 14 aa, Aspergillus fumigatus
WCHLPGQGCYMLKR

SEQ ID NO: 2359 - protein, 14 aa, Aspergillus heteromorphus
WCVLPGQPCHKMKR

SEQ ID NO: 2360 - protein, 14 aa, Aspergillus heteromorphus
WCVLPGQPCNKIKR

SEQ ID NO: 2361 - protein, 14 aa, Aspergillus heteromorphus
WCYLPGQPCAMMKR

SEQ ID NO: 2362 - protein, 14 aa, Aspergillus heteromorphus
WCYLPGQPCQKIKR

SEQ ID NO: 2363 - protein, 14 aa, Aspergillus ibericus
WCYLPGQPCTKIKR

SEQ ID NO: 2364 - protein, 14 aa, Aspergillus ibericus
WCYLPGQPCTMIKR

SEQ ID NO: 2365 - protein, 14 aa, Aspergillus indologenus
WCYLPGQPCAMMKR

SEQ ID NO: 2366 - protein, 14 aa, Aspergillus indologenus
WCYLPGQPCQKIKR

SEQ ID NO: 2367 - protein, 14 aa, Aspergillus japonicus
WCYLPGQPCAMMKR

SEQ ID NO: 2368 - protein, 14 aa, Aspergillus japonicus
WCYLPGQPCQKIKR

SEQ ID NO: 2369 - protein, 14 aa, Aspergillus lentulus
WCHLPGQGCAKAKR

SEQ ID NO: 2370 - protein, 14 aa, Aspergillus lentulus
WCHLPGQGCYMLKR

SEQ ID NO: 2371 - protein, 14 aa, Aspergillus lentulus
WCHLPGQGCAKAKR

SEQ ID NO: 2372 - protein, 14 aa, Aspergillus lentulus
WCHLPGQGCYMLKR

SEQ ID NO: 2373 - protein, 14 aa, Aspergillus lentulus
WCHLPGQGCAKAKR

SEQ ID NO: 2374 - protein, 14 aa, Aspergillus lentulus
WCHLPGQGCYMLKR

SEQ ID NO: 2375 - protein, 14 aa, Aspergillus lentulus
WCHLPGQGCAKAKR

SEQ ID NO: 2376 - protein, 14 aa, Aspergillus lentulus
WCHLPGQGCYMLKR

SEQ ID NO: 2377 - protein, 14 aa, Aspergillus lentulus
WCHLPGQGCAKAKR

SEQ ID NO: 2378 - protein, 14 aa, Aspergillus lentulus
WCHLPGQGCYMLKR

SEQ ID NO: 2379 - protein, 14 aa, Aspergillus lentulus
WCHLPGQGCAKAKR

SEQ ID NO: 2380 - protein, 14 aa, Aspergillus lentulus
WCHLPGQGCYMLKR

SEQ ID NO: 2381 - protein, 14 aa, Aspergillus lentulus
WCHLPGQGCAKAKR

SEQ ID NO: 2382 - protein, 14 aa, Aspergillus lentulus
WCHLPGQGCYMLKR

SEQ ID NO: 2383 - protein, 14 aa, Aspergillus lentulus
WCHLPGQGCAKAKR

SEQ ID NO: 2384 - protein, 14 aa, Aspergillus lentulus
WCHLPGQGCYMLKR

SEQ ID NO: 2385 - protein, 14 aa, Aspergillus lentulus
WCHLPGQGCAKAKR

SEQ ID NO: 2386 - protein, 14 aa, Aspergillus lentulus
WCHLPGQGCYMLKR

SEQ ID NO: 2387 - protein, 14 aa, Aspergillus lentulus
WCHLPGQGCAKAKR

SEQ ID NO: 2388 - protein, 14 aa, Aspergillus lentulus
WCHLPGQGCYMLKR

SEQ ID NO: 2389 - protein, 14 aa, Aspergillus lentulus
WCHLPGQGCAKAKR

SEQ ID NO: 2390 - protein, 14 aa, Aspergillus lentulus
WCHLPGQGCYMLKR

SEQ ID NO: 2391 - protein, 14 aa, Aspergillus lentulus
WCHLPGQGCAKAKR

SEQ ID NO: 2392 - protein, 14 aa, Aspergillus lentulus
WCHLPGQGCYMLKR

SEQ ID NO: 2393 - protein, 14 aa, Aspergillus luchuensis
WCHLPGQPCNMIKR

SEQ ID NO: 2394 - protein, 14 aa, Aspergillus luchuensis
WCVLPGQPCNKIKR

SEQ ID NO: 2395 - protein, 14 aa, Aspergillus luchuensis
WCHLPGQPCNMIKR

SEQ ID NO: 2396 - protein, 14 aa, Aspergillus luchuensis
WCVLPGQPCNKIKR

SEQ ID NO: 2397 - protein, 14 aa, Aspergillus luchuensis
WCHLPGQPCNMIKR

SEQ ID NO: 2398 - protein, 14 aa, Aspergillus luchuensis
WCVLPGQPCNKIKR

SEQ ID NO: 2399 - protein, 14 aa, Aspergillus mulundensis
WCRWPGQVCHKAKR

SEQ ID NO: 2400 - protein, 14 aa, Aspergillus mulundensis
WCRWPGQVCHKSKR

SEQ ID NO: 2401 - protein, 14 aa, Aspergillus neoniger
WCVLPGQPCNKIKR

SEQ ID NO: 2402 - protein, 14 aa, Aspergillus neoniger
WCYLPGQPCNMIKR

SEQ ID NO: 2403 - protein, 14 aa, Aspergillus niger
WCVLPGQPCNKIKR

SEQ ID NO: 2404 - protein, 14 aa, Aspergillus niger
WCVLPGQPCNMIKR

SEQ ID NO: 2405 - protein, 14 aa, Aspergillus niger
WCHLPGQPCNMIKR

SEQ ID NO: 2406 - protein, 14 aa, Aspergillus niger
WCVLPGQPCNKIKR

SEQ ID NO: 2407 - protein, 14 aa, Aspergillus niger
WCVLPGQPCNKIKR

SEQ ID NO: 2408 - protein, 14 aa, Aspergillus niger
WCVLPGQSCNMIKR

SEQ ID NO: 2409 - protein, 14 aa, Aspergillus niger
WCVLPGQPCNKIKR

SEQ ID NO: 2410 - protein, 14 aa, Aspergillus niger
WCVLPGQSCNMIKR

SEQ ID NO: 2411 - protein, 14 aa, Aspergillus niger
WCVLPGQPCNKIKR

SEQ ID NO: 2412 - protein, 14 aa, Aspergillus niger
WCVLPGQSCNMIKR

SEQ ID NO: 2413 - protein, 14 aa, Aspergillus niger
WCVLPGQPCNKIKR

SEQ ID NO: 2414 - protein, 14 aa, Aspergillus niger
WCVLPGQPCNMIKR

SEQ ID NO: 2415 - protein, 14 aa, Aspergillus niger
WCVLPGQPCNKIKR

SEQ ID NO: 2416 - protein, 14 aa, Aspergillus niger
WCVLPGQPCNMIKR

SEQ ID NO: 2417 - protein, 14 aa, Aspergillus nomiae
WCALPAQGCYMLKR

SEQ ID NO: 2418 - protein, 14 aa, Aspergillus nomiae
WCALPGQGCLKAKR

SEQ ID NO: 2419 - protein, 14 aa, Aspergillus novofumigatus
WCHLPGQGCAKAKR

SEQ ID NO: 2420 - protein, 14 aa, Aspergillus novofumigatus
WCHLPGQGCYMLKR

SEQ ID NO: 2421 - protein, 14 aa, Aspergillus phoenicis
WCVLPGQPCNKIKR

SEQ ID NO: 2422 - protein, 14 aa, Aspergillus phoenicis
WCVLPGQPCNMIKR

SEQ ID NO: 2423 - protein, 14 aa, Aspergillus piperis
WCHLPGQPCNMIKR

SEQ ID NO: 2424 - protein, 14 aa, Aspergillus piperis
WCVLPGQPCNKIKR

SEQ ID NO: 2425 - protein, 14 aa, Aspergillus saccharolyticus
WCYLPGQPCAMMKR

SEQ ID NO: 2426 - protein, 14 aa, Aspergillus saccharolyticus
WCYLPGQPCQKIKR

SEQ ID NO: 2427 - protein, 14 aa, Aspergillus sclerotialis
WCYLPGQGCNKMKR

SEQ ID NO: 2428 - protein, 14 aa, Aspergillus sclerotialis
WCYLPGQGCYMLKR

SEQ ID NO: 2429 - protein, 14 aa, Aspergillus sclerotiicarbonarius
WCYLPGQPCTKIKR

SEQ ID NO: 2430 - protein, 14 aa, Aspergillus sclerotiicarbonarius
WCYLPGQPCTMIKR

SEQ ID NO: 2431 - protein, 14 aa, Aspergillus taichungensis
WCHFPGQGCQKAKR

SEQ ID NO: 2432 - protein, 14 aa, Aspergillus taichungensis
WCHFPGQGCYMLKR

SEQ ID NO: 2433 - protein, 14 aa, Aspergillus terreus
WCWLPGQGCLKVKR

SEQ ID NO: 2434 - protein, 14 aa, Aspergillus terreus
WCWLPGQGCYMLKR

SEQ ID NO: 2435 - protein, 14 aa, Aspergillus terreus
WCWLPGQGCLKVKR

SEQ ID NO: 2436 - protein, 14 aa, Aspergillus terreus
WCWLPGQGCYMLKR

SEQ ID NO: 2437 - protein, 14 aa, Aspergillus thermomutatus
WCHLPGQGCAKAKR

SEQ ID NO: 2438 - protein, 14 aa, Aspergillus thermomutatus
WCQLPGQGCYMLKR

SEQ ID NO: 2439 - protein, 14 aa, Aspergillus tubingensis
WCHLPGQPCNMIKR

SEQ ID NO: 2440 - protein, 14 aa, Aspergillus tubingensis
WCVLPGQPCNKIKR

SEQ ID NO: 2441 - protein, 14 aa, Aspergillus tubingensis
WCHLPGQPCNMIKR

SEQ ID NO: 2442 - protein, 14 aa, Aspergillus tubingensis
WCVLPGQPCNKIKR

SEQ ID NO: 2443 - protein, 14 aa, Aspergillus turcosus
WCHLPGQGCAKAKR

SEQ ID NO: 2444 - protein, 14 aa, Aspergillus turcosus
WCHLPGQGCYMLKR

SEQ ID NO: 2445 - protein, 14 aa, Aspergillus turcosus
WCHLPGQGCAKAKR

SEQ ID NO: 2446 - protein, 14 aa, Aspergillus turcosus
WCHLPGQGCYMLKR

SEQ ID NO: 2447 - protein, 14 aa, Aspergillus udagawae
WCHLPGQGCAKAKR

SEQ ID NO: 2448 - protein, 14 aa, Aspergillus udagawae
WCHLPGQGCYMLKR

SEQ ID NO: 2449 - protein, 14 aa, Aspergillus udagawae
WCHLPGQGCAKAKR

SEQ ID NO: 2450 - protein, 14 aa, Aspergillus udagawae
WCHLPGQGCYKLKR

SEQ ID NO: 2451 - protein, 14 aa, Aspergillus udagawae
WCHLPGQGCAKAKR

SEQ ID NO: 2452 - protein, 14 aa, Aspergillus udagawae
WCHLPGQGCYMLKR

SEQ ID NO: 2453 - protein, 14 aa, Aspergillus udagawae
WCHLPGQGCAKAKR

SEQ ID NO: 2454 - protein, 14 aa, Aspergillus udagawae
WCHLPGQGCYKLKR

SEQ ID NO: 2455 - protein, 14 aa, Aspergillus udagawae
WCHLPGQGCAKAKR

SEQ ID NO: 2456 - protein, 14 aa, Aspergillus udagawae
WCHLPGQGCYKLKR

SEQ ID NO: 2457 - protein, 14 aa, Aspergillus uvarum
WCYLPGQPCAMMKR

SEQ ID NO: 2458 - protein, 14 aa, Aspergillus uvarum
WCYLPGQPCQKIKR

SEQ ID NO: 2459 - protein, 14 aa, Aspergillus vadensis
WCHLPGQPCNMIKR

SEQ ID NO: 2460 - protein, 14 aa, Aspergillus vadensis
WCVLPGQPCNKIKR

SEQ ID NO: 2461 - protein, 14 aa, Aspergillus violaceofuscus
WCYLPGQPCAMMKR

SEQ ID NO: 2462 - protein, 14 aa, Aspergillus violaceofuscus
WCYLPGQPCQKIKR

SEQ ID NO: 2463 - protein, 14 aa, Aspergillus welwitschiae
WCVLPGQPCNKIKR

SEQ ID NO: 2464 - protein, 14 aa, Aspergillus welwitschiae
WCVLPGQPCNMIKR

SEQ ID NO: 2465 - protein, 14 aa, Aulographum hederae
FCHLPGQVCGKAKR

SEQ ID NO: 2466 - protein, 14 aa, Aulographum hederae
FCHLPGQVCGKARR

SEQ ID NO: 2467 - protein, 14 aa, Aulographum hederae
FCHLPGQVCGKLKR

SEQ ID NO: 2468 - protein, 14 aa, Aulographum hederae
FCHLPGQVCGKVKR

SEQ ID NO: 2469 - protein, 13 aa, Aulographum hederae
FCHLPGRVCGKKR

SEQ ID NO: 2470 - protein, 14 aa, Beauveria bassiana
WCMRPGQPCWKAKR

SEQ ID NO: 2471 - protein, 14 aa, Beauveria bassiana
WCMRPGQPCWKLKR

SEQ ID NO: 2472 - protein, 12 aa, Beauveria bassiana
WCMRPGQPCWKR

SEQ ID NO: 2473 - protein, 14 aa, Beauveria bassiana
WCMRPGQPCWKAKR

SEQ ID NO: 2474 - protein, 14 aa, Beauveria bassiana
WCMRPGQPCWKLKR

SEQ ID NO: 2475 - protein, 12 aa, Beauveria bassiana
WCMRPGQPCWKR

SEQ ID NO: 2476 - protein, 14 aa, Beauveria bassiana
WCMRPGQPCWKAKR

SEQ ID NO: 2477 - protein, 14 aa, Beauveria bassiana
WCMRPGQPCWKLKR

SEQ ID NO: 2478 - protein, 12 aa, Beauveria bassiana
WCMRPGQPCWKR

SEQ ID NO: 2479 - protein, 14 aa, Beauveria bassiana
WCMRPGQPCWKAKR

SEQ ID NO: 2480 - protein, 14 aa, Beauveria bassiana
WCMRPGQPCWKLKR

SEQ ID NO: 2481 - protein, 12 aa, Beauveria bassiana
WCMRPGQPCWKR

SEQ ID NO: 2482 - protein, 14 aa, Beauveria brongniartii
WCLRPGEPCWKAKR

SEQ ID NO: 2483 - protein, 14 aa, Beauveria brongniartii
WCLRPGQPCWKLKR

SEQ ID NO: 2484 - protein, 11 aa, Beauveria brongniartii
WCMQNRKCWKR

SEQ ID NO: 2485 - protein, 14 aa, Botryosphaeria dothidea
FCHDEGQPCYRLKR

SEQ ID NO: 2486 - protein, 13 aa, Botryosphaeria dothidea
YCHFRGSACPKKR

SEQ ID NO: 2487 - protein, 13 aa, Botryosphaeria dothidea
YCRFRGSACPKKR

SEQ ID NO: 2488 - protein, 13 aa, Botryosphaeria dothidea
YCRFRGSVCPKKR

SEQ ID NO: 2489 - protein, 14 aa, Botryosphaeria dothidea
FCHDEGQPCYRLKR

SEQ ID NO: 2490 - protein, 13 aa, Botryosphaeria dothidea
YCHFRGSACPKKR

SEQ ID NO: 2491 - protein, 13 aa, Botryosphaeria dothidea
YCRFRGSACPKKR

SEQ ID NO: 2492 - protein, 13 aa, Botryosphaeria dothidea
YCRFRGSVCPKKR

SEQ ID NO: 2493 - protein, 13 aa, Botryotinia calthae
CNMVGGACFEAKR

SEQ ID NO: 2494 - protein, 11 aa, Botryotinia calthae
WCGRHGQPCKR

SEQ ID NO: 2495 - protein, 13 aa, Botryotinia calthae
WCGRPGQPCKEKR

SEQ ID NO: 2496 - protein, 11 aa, Botryotinia calthae
WCGRPGQPCKR

SEQ ID NO: 2497 - protein, 13 aa, Botryotinia calthae
WCGRPGQPCKREA

SEQ ID NO: 2498 - protein, 14 aa, Botryotinia calthae
WCGRPGQPCRAVKR

SEQ ID NO: 2499 - protein, 14 aa, Botryotinia calthae
WCGRPGQPCRKAKR

SEQ ID NO: 2500 - protein, 14 aa, Botryotinia calthae
WCGRPGQPCRKNKR

SEQ ID NO: 2501 - protein, 11 aa, Botryotinia calthae
WCRRPGQPCKR

SEQ ID NO: 2502 - protein, 13 aa, Botryotinia convoluta
CNMVGGACFEAKR

SEQ ID NO: 2503 - protein, 13 aa, Botryotinia convoluta
WCGRPGQPCKEKR

SEQ ID NO: 2504 - protein, 11 aa, Botryotinia convoluta
WCGRPGQPCKR

SEQ ID NO: 2505 - protein, 14 aa, Botryotinia convoluta
WCGRPGQPCRAVKR

SEQ ID NO: 2506 - protein, 14 aa, Botryotinia convoluta
WCGRPGQPCRKAKR

SEQ ID NO: 2507 - protein, 14 aa, Botryotinia convoluta
WCGRPGQPCRKNKR

SEQ ID NO: 2508 - protein, 13 aa, Botryotinia narcissicola
CNMVGGACFEAKR

SEQ ID NO: 2509 - protein, 13 aa, Botryotinia narcissicola
WCGRPGQPCKEKR

SEQ ID NO: 2510 - protein, 11 aa, Botryotinia narcissicola
WCGRPGQPCKR

SEQ ID NO: 2511 - protein, 14 aa, Botryotinia narcissicola
WCGRPGQPCRAVKR

SEQ ID NO: 2512 - protein, 14 aa, Botryotinia narcissicola
WCGRPGQPCRKAKR

SEQ ID NO: 2513 - protein, 14 aa, Botryotinia narcissicola
WCGRPGQPCRKNKR

SEQ ID NO: 2514 - protein, 13 aa, Botrytis cinerea
CNMVGGACFEAKR

SEQ ID NO: 2515 - protein, 13 aa, Botrytis cinerea
WCGRPGQPCKEKR

SEQ ID NO: 2516 - protein, 11 aa, Botrytis cinerea
WCGRPGQPCKR

SEQ ID NO: 2517 - protein, 13 aa, Botrytis cinerea
WCGRPGQPCKREA

SEQ ID NO: 2518 - protein, 12 aa, Botrytis cinerea
WCGRPGQPCKRT

SEQ ID NO: 2519 - protein, 14 aa, Botrytis cinerea
WCGRPGQPCRAVKR

SEQ ID NO: 2520 - protein, 14 aa, Botrytis cinerea
WCGRPGQPCRKAKR

SEQ ID NO: 2521 - protein, 14 aa, Botrytis cinerea
WCGRPGQPCRKNKR

SEQ ID NO: 2522 - protein, 13 aa, Botrytis cinerea
CNMVGGACFEAKR

SEQ ID NO: 2523 - protein, 13 aa, Botrytis cinerea
WCGRPGQPCKEKR

SEQ ID NO: 2524 - protein, 11 aa, Botrytis cinerea
WCGRPGQPCKR

SEQ ID NO: 2525 - protein, 13 aa, Botrytis cinerea
WCGRPGQPCKREA

SEQ ID NO: 2526 - protein, 12 aa, Botrytis cinerea
WCGRPGQPCKRT

SEQ ID NO: 2527 - protein, 14 aa, Botrytis cinerea
WCGRPGQPCRAVKR

SEQ ID NO: 2528 - protein, 14 aa, Botrytis cinerea
WCGRPGQPCRKAKR

SEQ ID NO: 2529 - protein, 14 aa, Botrytis cinerea
WCGRPGQPCRKNKR

SEQ ID NO: 2530 - protein, 13 aa, Botrytis cinerea
CNMVGGACFEAKR

SEQ ID NO: 2531 - protein, 13 aa, Botrytis cinerea
WCGRPGQPCKEKR

SEQ ID NO: 2532 - protein, 11 aa, Botrytis cinerea
WCGRPGQPCKR

SEQ ID NO: 2533 - protein, 13 aa, Botrytis cinerea
WCGRPGQPCKREA

SEQ ID NO: 2534 - protein, 12 aa, Botrytis cinerea
WCGRPGQPCKRT

SEQ ID NO: 2535 - protein, 14 aa, Botrytis cinerea
WCGRPGQPCRAVKR

SEQ ID NO: 2536 - protein, 14 aa, Botrytis cinerea
WCGRPGQPCRKAKR

SEQ ID NO: 2537 - protein, 14 aa, Botrytis cinerea
WCGRPGQPCRKNKR

SEQ ID NO: 2538 - protein, 13 aa, Botrytis elliptica
CNMVGGACFEAKR

SEQ ID NO: 2539 - protein, 14 aa, Botrytis elliptica
WCGLPGQPCRKAKR

SEQ ID NO: 2540 - protein, 11 aa, Botrytis elliptica
WCGRPGQPCKR

SEQ ID NO: 2541 - protein, 14 aa, Botrytis elliptica
WCGRPGQPCRAVKR

SEQ ID NO: 2542 - protein, 14 aa, Botrytis elliptica
WCGRPGQPCRKNKR

SEQ ID NO: 2543 - protein, 13 aa, Botrytis fragariae
CNMVGGACFEAKR

SEQ ID NO: 2544 - protein, 13 aa, Botrytis fragariae
WCGRPGQPCKEKR

SEQ ID NO: 2545 - protein, 11 aa, Botrytis fragariae
WCGRPGQPCKR

SEQ ID NO: 2546 - protein, 14 aa, Botrytis fragariae
WCGRPGQPCRAVKR

SEQ ID NO: 2547 - protein, 14 aa, Botrytis fragariae
WCGRPGQPCRKAKR

SEQ ID NO: 2548 - protein, 14 aa, Botrytis fragariae
WCGRPGQPCRKNKR

SEQ ID NO: 2549 - protein, 13 aa, Botrytis galanthina
CNMVGGACFEAKR

SEQ ID NO: 2550 - protein, 13 aa, Botrytis galanthina
WCGRPGQPCKEKR

SEQ ID NO: 2551 - protein, 11 aa, Botrytis galanthina
WCGRPGQPCKR

SEQ ID NO: 2552 - protein, 14 aa, Botrytis galanthina
WCGRPGQPCRAVKR

SEQ ID NO: 2553 - protein, 14 aa, Botrytis galanthina
WCGRPGQPCRKAKR

SEQ ID NO: 2554 - protein, 14 aa, Botrytis galanthina
WCGRPGQPCRKNKR

SEQ ID NO: 2555 - protein, 13 aa, Botrytis hyacinthi
CNMVGGACFEAKR

SEQ ID NO: 2556 - protein, 13 aa, Botrytis hyacinthi
WCGRPGQPCKEKR

SEQ ID NO: 2557 - protein, 11 aa, Botrytis hyacinthi
WCGRPGQPCKR

SEQ ID NO: 2558 - protein, 14 aa, Botrytis hyacinthi
WCGRPGQPCRKAKR

SEQ ID NO: 2559 - protein, 14 aa, Botrytis hyacinthi
WCGRPGQPCRKNKR

SEQ ID NO: 2560 - protein, 14 aa, Botrytis hyacinthi
WCGRPGQPCSAVKR

SEQ ID NO: 2561 - protein, 13 aa, Botrytis paeoniae
CNMVGGACFEAKR

SEQ ID NO: 2562 - protein, 13 aa, Botrytis paeoniae
WCGRPGQPCKEKR

SEQ ID NO: 2563 - protein, 11 aa, Botrytis paeoniae
WCGRPGQPCKR

SEQ ID NO: 2564 - protein, 14 aa, Botrytis paeoniae
WCGRPGQPCRAVKR

SEQ ID NO: 2565 - protein, 14 aa, Botrytis paeoniae
WCGRPGQPCRKAKR

SEQ ID NO: 2566 - protein, 14 aa, Botrytis paeoniae
WCGRPGQPCRKNKR

SEQ ID NO: 2567 - protein, 11 aa, Botrytis paeoniae
WCGRSGQPCKR

SEQ ID NO: 2568 - protein, 11 aa, Botrytis porri
WCGRPGQPCKR

SEQ ID NO: 2569 - protein, 14 aa, Botrytis porri
WCGRPGQPCRAVKR

SEQ ID NO: 2570 - protein, 14 aa, Botrytis porri
WCGRPGQPCRKAKR

SEQ ID NO: 2571 - protein, 13 aa, Botrytis tulipae
CNMVGGACFEAKR

SEQ ID NO: 2572 - protein, 13 aa, Botrytis tulipae
WCGRPGQPCKEKR

SEQ ID NO: 2573 - protein, 11 aa, Botrytis tulipae
WCGRPGQPCKR

SEQ ID NO: 2574 - protein, 14 aa, Botrytis tulipae
WCGRPGQPCRAVKR

SEQ ID NO: 2575 - protein, 14 aa, Botrytis tulipae
WCGRPGQPCRKAKR

SEQ ID NO: 2576 - protein, 14 aa, Botrytis tulipae
WCGRPGQPCRKNKR

SEQ ID NO: 2577 - protein, 13 aa, Cadophora sp.
  source 1..13: note = DSE1049
CGHPGQPCGKAKR

SEQ ID NO: 2578 - protein, 11 aa, Cadophora sp.
  source 1..11: note = DSE1049
CGHPGQPCGKR

SEQ ID NO: 2579 - protein, 11 aa, Cenococcum geophilum
AAPNAVTKLKR

SEQ ID NO: 2580 - protein, 13 aa, Cenococcum geophilum
CHLPGQSCGKIKR

SEQ ID NO: 2581 - protein, 14 aa, Cenococcum geophilum
GCHLPGQSCGKAKR

SEQ ID NO: 2582 - protein, 17 aa, Cenococcum geophilum
YIHGCHLPGQSCGKAKR

SEQ ID NO: 2583 - protein, 9 aa, Chaetomium thermophilum
CTGQSCWKR

SEQ ID NO: 2584 - protein, 14 aa, Chaetomium thermophilum
RCISEGGACWRAKR

SEQ ID NO: 2585 - protein, 13 aa, Chaetomium thermophilum
SCTRFVGESCWKR

SEQ ID NO: 2586 - protein, 14 aa, Chaetomium thermophilum
WCEMAGQACDTVKR

SEQ ID NO: 2587 - protein, 13 aa, Chaetomium thermophilum
WCKLFPGQPCWKR

SEQ ID NO: 2588 - protein, 13 aa, Chaetomium thermophilum
WCTRFPGQPCWKR

SEQ ID NO: 2589 - protein, 13 aa, Chalara longipes
  source 1..13: note = BDJ
CGARGQPCGKAKR

SEQ ID NO: 2590 - protein, 13 aa, Chalara longipes
  source 1..13: note = BDJ
CGARGQPCGKVKR

SEQ ID NO: 2591 - protein, 14 aa, Chlorociboria aeruginascens
CGRPGQGCKDKAKR

SEQ ID NO: 2592 - protein, 14 aa, Chlorociboria aeruginascens
CGRPGQGCKDKLKR

SEQ ID NO: 2593 - protein, 10 aa, Chlorociboria aeruginascens
CGRPGQGCKR

SEQ ID NO: 2594 - protein, 13 aa, Chlorociboria aeruginascens
CGRPGQGCRKAKR

SEQ ID NO: 2595 - protein, 13 aa, Chlorociboria aeruginascens
CGSEGQPCARVKR

SEQ ID NO: 2596 - protein, 13 aa, Chlorociboria aeruginascens
CNLVGGACYEAKR

SEQ ID NO: 2597 - protein, 14 aa, Claviceps purpurea
WCWRPGEGCWKAKR

SEQ ID NO: 2598 - protein, 14 aa, Claviceps purpurea
WCWRPGQGCWKVKR

SEQ ID NO: 2599 - protein, 10 aa, Coleophoma cylindrospora
CGRLGQPCKR

SEQ ID NO: 2600 - protein, 10 aa, Coleophoma cylindrospora
CGRMGQPCKR

SEQ ID NO: 2601 - protein, 12 aa, Colletotrichum aenigma
WCTKPGQPCWKR

SEQ ID NO: 2602 - protein, 12 aa, Colletotrichum asianum
WCTEPGQPCWKR

SEQ ID NO: 2603 - protein, 12 aa, Colletotrichum asianum
WCTKPDQPCWKR

SEQ ID NO: 2604 - protein, 12 aa, Colletotrichum asianum
WCTKPGQPCWKR

SEQ ID NO: 2605 - protein, 12 aa, Colletotrichum asianum
WCTQPGQPCWKR

SEQ ID NO: 2606 - protein, 12 aa, Colletotrichum fructicola
WCNKPGQPCWKR

SEQ ID NO: 2607 - protein, 12 aa, Colletotrichum fructicola
WCTKPGQPCWKR

SEQ ID NO: 2608 - protein, 12 aa, Colletotrichum fructicola
WCNKPGQPCWKR

SEQ ID NO: 2609 - protein, 12 aa, Colletotrichum fructicola
WCTKPGQPCWKR

SEQ ID NO: 2610 - protein, 12 aa, Colletotrichum fructicola
WCNKPGQPCWKR

SEQ ID NO: 2611 - protein, 12 aa, Colletotrichum fructicola
WCTKPGQPCWKR

SEQ ID NO: 2612 - protein, 12 aa, Colletotrichum fructicola
WCNKPGQPCWKR

SEQ ID NO: 2613 - protein, 12 aa, Colletotrichum fructicola
WCTKPGQPCWKR

SEQ ID NO: 2614 - protein, 12 aa, Colletotrichum fructicola
WCNKPGQPCWKR

SEQ ID NO: 2615 - protein, 12 aa, Colletotrichum fructicola
WCTKPGQPCWKR

SEQ ID NO: 2616 - protein, 12 aa, Colletotrichum fructicola
WCNKPGQPCWKR

SEQ ID NO: 2617 - protein, 12 aa, Colletotrichum fructicola
WCTKPGQPCWKR

SEQ ID NO: 2618 - protein, 12 aa, Colletotrichum fructicola
WCNKPGQPCWKR

SEQ ID NO: 2619 - protein, 12 aa, Colletotrichum fructicola
WCTKPGQPCWKR

SEQ ID NO: 2620 - protein, 12 aa, Colletotrichum gloeosporioides
WCTKPGQPCWKR

SEQ ID NO: 2621 - protein, 14 aa, Colletotrichum higginsianum
WCRSVGQPCWKVKR

SEQ ID NO: 2622 - protein, 14 aa, Colletotrichum higginsianum
WCSQPGAPCSVAKR

SEQ ID NO: 2623 - protein, 14 aa, Colletotrichum higginsianum
WCRSVGQPCWKVKR

SEQ ID NO: 2624 - protein, 14 aa, Colletotrichum higginsianum
WCSQPGAPCSVAKR

SEQ ID NO: 2625 - protein, 16 aa, Colletotrichum orchidophilum
RCQSIGQPCWKARVKR

SEQ ID NO: 2626 - protein, 14 aa, Colletotrichum orchidophilum
WCQNVGEPCWRVKR

SEQ ID NO: 2627 - protein, 13 aa, Colletotrichum orchidophilum
WCQSVGQSCWKDK

SEQ ID NO: 2628 - protein, 14 aa, Colletotrichum salicis
WCNRKLIGQPCWKR

SEQ ID NO: 2629 - protein, 14 aa, Colletotrichum salicis
WCQAVGQGCWKVKR

SEQ ID NO: 2630 - protein, 13 aa, Colletotrichum salicis
WCQDINQPCWKTK

SEQ ID NO: 2631 - protein, 14 aa, Colletotrichum shisoi
WCRSVGQPCWKVKR

SEQ ID NO: 2632 - protein, 14 aa, Colletotrichum shisoi
WCRTVGQPCWKAKR

SEQ ID NO: 2633 - protein, 14 aa, Colletotrichum shisoi
WCSQPGAPCSVAKR

SEQ ID NO: 2634 - protein, 12 aa, Colletotrichum siamense
WCTKPGQPCWKR

SEQ ID NO: 2635 - protein, 12 aa, Colletotrichum siamense
WCTKPGQPCWKR

SEQ ID NO: 2636 - protein, 12 aa, Colletotrichum siamense
WCTKPGQPCWKR

SEQ ID NO: 2637 - protein, 12 aa, Colletotrichum siamense
WCMKPGQPCWKR

SEQ ID NO: 2638 - protein, 12 aa, Colletotrichum siamense
WCTKPGQPCWKR

SEQ ID NO: 2639 - protein, 12 aa, Colletotrichum siamense
WCTKPGQPCWKR

SEQ ID NO: 2640 - protein, 13 aa, Colletotrichum tanaceti
WCRTVGQPCWKEK

SEQ ID NO: 2641 - protein, 14 aa, Colletotrichum tanaceti
WCRTVGQPCWKVKR

SEQ ID NO: 2642 - protein, 14 aa, Colletotrichum tanaceti
WCSQPGAPCSVAKR

SEQ ID NO: 2643 - protein, 12 aa, Colletotrichum tropicale
WCTKPGQPCWKR

SEQ ID NO: 2644 - protein, 12 aa, Colletotrichum viniferum
WCTEPGQPCWKR

SEQ ID NO: 2645 - protein, 12 aa, Colletotrichum viniferum
WCTKPGQPCWKR

SEQ ID NO: 2646 - protein, 14 aa, Coniella lustricola
WCLFHGEGCWKEKR

SEQ ID NO: 2647 - protein, 12 aa, Coniella lustricola
WCLFHGEGCWKR

SEQ ID NO: 2648 - protein, 14 aa, Coniella lustricola
WCLFHGEGCWKVKR

SEQ ID NO: 2649 - protein, 14 aa, Coniochaeta ligniaria
WCNIRGEPCWKSKR

SEQ ID NO: 2650 - protein, 8 aa, Coniochaeta pulveracea
SPCWKSKR

SEQ ID NO: 2651 - protein, 14 aa, Coniochaeta pulveracea
WCPFKGQPCWKSKR

SEQ ID NO: 2652 - protein, 14 aa, Coniochaeta pulveracea
WCPHKGQPCWKNKR

SEQ ID NO: 2653 - protein, 14 aa, Coniochaeta pulveracea
WCPHPGEPCWKSKR

SEQ ID NO: 2654 - protein, 14 aa, Coniochaeta pulveracea
WCPHPGQPCWKNKR

SEQ ID NO: 2655 - protein, 14 aa, Coniochaeta pulveracea
WCPHPGQPCWKSKR

SEQ ID NO: 2656 - protein, 14 aa, Coniochaeta pulveracea
WCPYKGQPCWKNKR

SEQ ID NO: 2657 - protein, 14 aa, Coniochaeta pulveracea
WCRLRGQPCWKSKR

SEQ ID NO: 2658 - protein, 14 aa, Coniochaeta sp.
  source 1..14: note = 2T2.1
CTTKGEPCWKKSKR

SEQ ID NO: 2659 - protein, 13 aa, Coniochaeta sp.
  source 1..13: note = 2T2.1
CTTKGEPCWKNKR

SEQ ID NO: 2660 - protein, 14 aa, Coniochaeta sp.
  source 1..14: note = 2T2.1
WCSVKGEPCWKNKR

SEQ ID NO: 2661 - protein, 14 aa, Coniochaeta sp.
  source 1..14: note = 2T2.1
WCSVKGEPCWKSKR

SEQ ID NO: 2662 - protein, 14 aa, Coniochaeta sp.
  source 1..14: note = 2T2.1
WCSVKGEPCWKSRR

SEQ ID NO: 2663 - protein, 13 aa, Coniochaeta sp.
  source 1..13: note = 2T2.1
CTTKVEPCWKNKR

SEQ ID NO: 2664 - protein, 14 aa, Coniochaeta sp.
  source 1..14: note = 2T2.1
WCSVKGEPCWKSKR

SEQ ID NO: 2665 - protein, 14 aa, Coniochaeta sp.
  source 1..14: note = 2T2.1
WCSVKGEPCYKHKR

SEQ ID NO: 2666 - protein, 14 aa, Coniochaeta sp.
  source 1..14: note = 2T2.1
WCSVKGEPCYKNKR

SEQ ID NO: 2667 - protein, 14 aa, Coniochaeta sp.
  source 1..14: note = 2T2.1
WCSVKGEPCYKSKR

SEQ ID NO: 2668 - protein, 13 aa, Coniosporium apollinis
CGAPNKPCHKAKR

SEQ ID NO: 2669 - protein, 14 aa, Coniosporium apollinis
ICWQPNQACDKLKR

SEQ ID NO: 2670 - protein, 18 aa, Coniosporium apollinis
WGSRFCHKTGQGCPRLKR

SEQ ID NO: 2671 - protein, 18 aa, Coniosporium apollinis
WGSRFCHKTGQGCPRVKR

SEQ ID NO: 2672 - protein, 13 aa, Cordyceps fumosorosea
CFRPAQPCWKLKR

SEQ ID NO: 2673 - protein, 14 aa, Cordyceps fumosorosea
WCFRPAQPCWKAKR

SEQ ID NO: 2674 - protein, 12 aa, Cordyceps fumosorosea
WCFRPAQPCWKR

SEQ ID NO: 2675 - protein, 14 aa, Cordyceps militaris
WCLRPGQPCWKAKR

SEQ ID NO: 2676 - protein, 12 aa, Cordyceps militaris
WCTRPGEPCWKR

SEQ ID NO: 2677 - protein, 14 aa, Cordyceps militaris
WCTRPGQPCWKLKR

SEQ ID NO: 2678 - protein, 14 aa, Cordyceps militaris
FCHLPGQGCSKAKR

SEQ ID NO: 2679 - protein, 14 aa, Cordyceps militaris
FCHLPGQGCSKVKR

SEQ ID NO: 2680 - protein, 15 aa, Cryphonectria parasitica
FCPFEGSSTCYASKR

SEQ ID NO: 2681 - protein, 14 aa, Cryphonectria parasitica
WCLFHGEGCWKEKR

SEQ ID NO: 2682 - protein, 12 aa, Cryphonectria parasitica
WCLFHGEGCWKR

SEQ ID NO: 2683 - protein, 14 aa, Cryphonectria parasitica
WCLFHGEGCWKVKR

SEQ ID NO: 2684 - protein, 14 aa, Cytospora leucostoma
SCEQPGEACFKARR

SEQ ID NO: 2685 - protein, 12 aa, Cytospora leucostoma
WCLLKGQGCWKR

SEQ ID NO: 2686 - protein, 13 aa, Delitschia confertaspora
CTFGHATCQKLKR

SEQ ID NO: 2687 - protein, 14 aa, Delitschia confertaspora
NCRFPGQSCSKAKR

SEQ ID NO: 2688 - protein, 14 aa, Delitschia confertaspora
NCRFPGQSCSKEKR

SEQ ID NO: 2689 - protein, 13 aa, Diaporthe ampelina
CEQPGEACHKARS

SEQ ID NO: 2690 - protein, 17 aa, Diaporthe ampelina
FCPFGGEAGSVCYASKR

SEQ ID NO: 2691 - protein, 14 aa, Diaporthe ampelina
WCFWKGQGCWKAKR

SEQ ID NO: 2692 - protein, 12 aa, Diaporthe ampelina
WCFWKGQGCWKR

SEQ ID NO: 2693 - protein, 12 aa, Diaporthe helianthi
CEEPGEACNKAR

SEQ ID NO: 2694 - protein, 17 aa, Diaporthe helianthi
FCPFGGEAGSVCYASKR

SEQ ID NO: 2695 - protein, 14 aa, Diaporthe helianthi
WCFWKGEGCWKAKR

SEQ ID NO: 2696 - protein, 12 aa, Diaporthe helianthi
WCFWKGEGCWKR

SEQ ID NO: 2697 - protein, 13 aa, Diplocarpon rosae
CGHPGQPCGKAKR

SEQ ID NO: 2698 - protein, 13 aa, Diplocarpon rosae
CGHPGQPCGKVKR

SEQ ID NO: 2699 - protein, 20 aa, Diplocarpon rosae
WTTLDARCNLVGGACYEAKR

SEQ ID NO: 2700 - protein, 13 aa, Diplocarpon rosae
CGHPGQPCGKAKR

SEQ ID NO: 2701 - protein, 13 aa, Diplodia corticola
CSGPADLCTMAKR

SEQ ID NO: 2702 - protein, 14 aa, Diplodia corticola
FCGRIRGQPCHKKR

SEQ ID NO: 2703 - protein, 15 aa, Diplodia corticola
FCGRIRGQPCHKLKR

SEQ ID NO: 2704 - protein, 11 aa, Dothistroma septosporum
CTAPGIACAKR

SEQ ID NO: 2705 - protein, 11 aa, Dothistroma septosporum
CTAPGIACGKR

SEQ ID NO: 2706 - protein, 11 aa, Dothistroma septosporum
CTVPGLACGKR

SEQ ID NO: 2707 - protein, 14 aa, Dothistroma septosporum
FCGLPGEACSRAKR

SEQ ID NO: 2708 - protein, 12 aa, Dothistroma septosporum
RCSAPGIGCEKR

SEQ ID NO: 2709 - protein, 12 aa, Dothistroma septosporum
RCTVPGLACGKR

SEQ ID NO: 2710 - protein, 14 aa, Drechmeria coniospora
WCTRPGSGCWKAKR

SEQ ID NO: 2711 - protein, 13 aa, Drechmeria coniospora
WCTRPGSGCWKKR

SEQ ID NO: 2712 - protein, 14 aa, Drechmeria coniospora
WCTRPGSGCWKVKR

SEQ ID NO: 2713 - protein, 14 aa, Drechmeria coniospora
WCTRPGSGCWKAKR

SEQ ID NO: 2714 - protein, 13 aa, Drechmeria coniospora
WCTRPGSGCWKKR

SEQ ID NO: 2715 - protein, 14 aa, Drechmeria coniospora
WCTRPGSGCWKVKR

SEQ ID NO: 2716 - protein, 13 aa, Drepanopeziza brunnea
CGYRGQPCPKAKR

SEQ ID NO: 2717 - protein, 9 aa, Escovopsis weberi
WAVAYKSKR

SEQ ID NO: 2718 - protein, 14 aa, Escovopsis weberi
WCIYPGQGCWKAKR

SEQ ID NO: 2719 - protein, 14 aa, Escovopsis weberi
WCMNPGQGCWKVKR

SEQ ID NO: 2720 - protein, 14 aa, Escovopsis weberi
WCTNPGQGCWKAKR

SEQ ID NO: 2721 - protein, 14 aa, Escovopsis weberi
WCTNPGQGCWKKKR

SEQ ID NO: 2722 - protein, 12 aa, Escovopsis weberi
WCTNPGQGCWKR

SEQ ID NO: 2723 - protein, 12 aa, Escovopsis weberi
WHFPTGCWKTKR

SEQ ID NO: 2724 - protein, 11 aa, Gaeumannomyces tritici
CQYRGQSCWKR

SEQ ID NO: 2725 - protein, 14 aa, Gaeumannomyces tritici
CTYRGQPCWKKTKR

SEQ ID NO: 2726 - protein, 14 aa, Gaeumannomyces tritici
FCGAEGQGCWQVKR

SEQ ID NO: 2727 - protein, 12 aa, Gaeumannomyces tritici
GCRFRGQSCWKR

SEQ ID NO: 2728 - protein, 12 aa, Gaeumannomyces tritici
GCRHRGQSCWKR

SEQ ID NO: 2729 - protein, 12 aa, Gaeumannomyces tritici
GCRNRGQSCWKR

SEQ ID NO: 2730 - protein, 12 aa, Gaeumannomyces tritici
GCRYRGQSCWKR

SEQ ID NO: 2731 - protein, 14 aa, Gaeumannomyces tritici
WCHEAGNACAVAKR

SEQ ID NO: 2732 - protein, 13 aa, Glarea lozoyensis
CIRHGQPCWKVKR

SEQ ID NO: 2733 - protein, 13 aa, Glarea lozoyensis
CQRHGQPCWKEKR

SEQ ID NO: 2734 - protein, 14 aa, Glarea lozoyensis
QCQRHGQPCWKVKR

SEQ ID NO: 2735 - protein, 13 aa, Glarea lozoyensis
CIRHGQPCWKVKR

SEQ ID NO: 2736 - protein, 13 aa, Glarea lozoyensis
CQRHGQPCWKEKR

SEQ ID NO: 2737 - protein, 14 aa, Glarea lozoyensis
QCQRHGQPCWKVKR

SEQ ID NO: 2738 - protein, 11 aa, Glonium stellatum
AEPNAVTKLKR

SEQ ID NO: 2739 - protein, 13 aa, Glonium stellatum
CHLPGQSCPKDKR

SEQ ID NO: 2740 - protein, 14 aa, Grosmannia clavigera
WCQWYGQACWKVKR

SEQ ID NO: 2741 - protein, 12 aa, Grosmannia clavigera
WCQWYGQGCWKR

SEQ ID NO: 2742 - protein, 13 aa, Helotiales sp.
  source 1..13: note = DMI-Dod-QoI
CGYPGQPCGKAKR

SEQ ID NO: 2743 - protein, 13 aa, Helotiales sp.
  source 1..13: note = DMI-Dod-QoI
CGYPGQPCGKLKR

SEQ ID NO: 2744 - protein, 13 aa, Helotiales sp.
  source 1..13: note = DMI-Dod-QoI
CGYPGQPCGKVKR

SEQ ID NO: 2745 - protein, 13 aa, Hyaloscypha bicolor
  source 1..13: note = E
CGARGQPCGKAKR

SEQ ID NO: 2746 - protein, 13 aa, Hyaloscypha bicolor
  source 1..13: note = E
CGARGQPCGKVKR

SEQ ID NO: 2747 - protein, 19 aa, Hyaloscypha hepaticicola
WDNDWGCGERGQPCGKVKR

SEQ ID NO: 2748 - protein, 17 aa, Hyaloscypha hepaticicola
WDWGCGERGQPCGKAKR

SEQ ID NO: 2749 - protein, 15 aa, Hyaloscypha hepaticicola
WGWGERGQPCGKAKR

SEQ ID NO: 2750 - protein, 13 aa, Lachnellula hyalina
CGARGQGCWKEKR

SEQ ID NO: 2751 - protein, 13 aa, Lachnellula hyalina
CGARGQGCWKIKR

SEQ ID NO: 2752 - protein, 13 aa, Lachnellula hyalina
CGARGQGCWKQKR

SEQ ID NO: 2753 - protein, 13 aa, Lachnellula hyalina
CGARGQGCWKVKR

SEQ ID NO: 2754 - protein, 14 aa, Lachnellula hyalina
GCGARGQGCWKIKR

SEQ ID NO: 2755 - protein, 12 aa, Lachnellula occidentalis
CGARGQGCPKKR

SEQ ID NO: 2756 - protein, 13 aa, Lachnellula occidentalis
CGARGQGCWKEKR

SEQ ID NO: 2757 - protein, 13 aa, Lachnellula occidentalis
CGARGQGCWKVKR

SEQ ID NO: 2758 - protein, 13 aa, Lachnellula subtilissima
CGARGQGCWKEKR

SEQ ID NO: 2759 - protein, 13 aa, Lachnellula subtilissima
CGARGQGCWKIKR

SEQ ID NO: 2760 - protein, 13 aa, Lachnellula subtilissima
CGARGQGCWKVKR

SEQ ID NO: 2761 - protein, 6 aa, Lachnellula subtilissima
CWKIKR

SEQ ID NO: 2762 - protein, 13 aa, Lachnellula suecica
CGARGQGCYKAKR

SEQ ID NO: 2763 - protein, 13 aa, Lachnellula suecica
CGARGQGCYKEKR

SEQ ID NO: 2764 - protein, 13 aa, Lachnellula suecica
CGARGQGCYKNKR

SEQ ID NO: 2765 - protein, 14 aa, Lachnellula suecica
GCGARGQGCYKIKR

SEQ ID NO: 2766 - protein, 13 aa, Lachnellula willkommii
CGARGQGCWKEKR

SEQ ID NO: 2767 - protein, 13 aa, Lachnellula willkommii
CGARGQGCWKIKR

SEQ ID NO: 2768 - protein, 13 aa, Lachnellula willkommii
CGARGQGCWKVKR

SEQ ID NO: 2769 - protein, 14 aa, Lachnellula willkommii
GCGARGQGCWKIKR

SEQ ID NO: 2770 - protein, 14 aa, Lasallia pustulata
FCYRPGEICSKAKR

SEQ ID NO: 2771 - protein, 14 aa, Lasallia pustulata
FCYRPGEICSKLKR

SEQ ID NO: 2772 - protein, 14 aa, Lasallia pustulata
FCYRPGEICSKTKR

SEQ ID NO: 2773 - protein, 14 aa, Lasallia pustulata
FCYRPGEICSKAKR

SEQ ID NO: 2774 - protein, 14 aa, Lasallia pustulata
FCYRPGEICSKLKR

SEQ ID NO: 2775 - protein, 14 aa, Lasallia pustulata
FCYRPGEICSKTKR

SEQ ID NO: 2776 - protein, 14 aa, Lasallia pustulata
FCYRRGEICSKAKR

SEQ ID NO: 2777 - protein, 13 aa, Lasiodiplodia theobromae
CSGPADLCTMAKR

SEQ ID NO: 2778 - protein, 14 aa, Lasiodiplodia theobromae
FCGRIRGQPCHKKR

SEQ ID NO: 2779 - protein, 15 aa, Lasiodiplodia theobromae
FCGRIRGQPCHKLKR

SEQ ID NO: 2780 - protein, 13 aa, Lasiodiplodia theobromae
CSGPADLCTMAKR

SEQ ID NO: 2781 - protein, 14 aa, Lasiodiplodia theobromae
FCGRIRGQPCHKKR

SEQ ID NO: 2782 - protein, 15 aa, Lasiodiplodia theobromae
FCGRIRGQPCHKLKR

SEQ ID NO: 2783 - protein, 13 aa, Letharia columbiana
CHAPGAPCSKAKR

SEQ ID NO: 2784 - protein, 14 aa, Letharia columbiana
FCWEAGEPCSKLKR

SEQ ID NO: 2785 - protein, 14 aa, Letharia columbiana
FCYLAGEPCSKAKR

SEQ ID NO: 2786 - protein, 17 aa, Letharia columbiana
WHGHCYRDDQPCSKLKR

SEQ ID NO: 2787 - protein, 17 aa, Letharia columbiana
WHGSCWPAGEPCSKQKR

SEQ ID NO: 2788 - protein, 13 aa, Lindgomyces ingoldianus
CAFGDEICEKIKR

SEQ ID NO: 2789 - protein, 13 aa, Lindgomyces ingoldianus
CRLVGQPCSKAKR

SEQ ID NO: 2790 - protein, 13 aa, Lindgomyces ingoldianus
CRLVGQPCSKQKR

SEQ ID NO: 2791 - protein, 11 aa, Lindgomyces ingoldianus
CRLVGQPCSKR

SEQ ID NO: 2792 - protein, 12 aa, Lindgomyces ingoldianus
RCRLVGQPCSKR

SEQ ID NO: 2793 - protein, 14 aa, Lindgomyces ingoldianus
SCGMPGQPCDRLKR

SEQ ID NO: 2794 - protein, 14 aa, Lineolata rhizophorae
FCHLPGQSCSKAKR

SEQ ID NO: 2795 - protein, 14 aa, Lineolata rhizophorae
FCHLPGQSCSKEKR

SEQ ID NO: 2796 - protein, 14 aa, Lineolata rhizophorae
FCHLPGQSCSKTRR

SEQ ID NO: 2797 - protein, 14 aa, Lineolata rhizophorae
FCHLPGQSCSKVKR

SEQ ID NO: 2798 - protein, 15 aa, Lineolata rhizophorae
YCHLPGQSCSEKEKR

SEQ ID NO: 2799 - protein, 14 aa, Lophiostoma macrostomum
FCHYRGQPCGKAKR

SEQ ID NO: 2800 - protein, 13 aa, Lophiotrema nucula
CGMPGQPCDRLKR

SEQ ID NO: 2801 - protein, 13 aa, Lophiotrema nucula
CLFVGQSCSVAKR

SEQ ID NO: 2802 - protein, 13 aa, Lophiotrema nucula
CQFSDATCQKIKR

SEQ ID NO: 2803 - protein, 13 aa, Lophiotrema nucula
CRFPGQPCSKEKR

SEQ ID NO: 2804 - protein, 12 aa, Lophiotrema nucula
CRFPGQPCSKKR

SEQ ID NO: 2805 - protein, 13 aa, Lophium mytilinum
CHLPGQSCSKDKR

SEQ ID NO: 2806 - protein, 13 aa, Lophium mytilinum
CHLPGQSCSKEKR

SEQ ID NO: 2807 - protein, 13 aa, Lophium mytilinum
CHLPGQSCSKTKR

SEQ ID NO: 2808 - protein, 15 aa, Lophium mytilinum
WGCHLPGQSCSKDKR

SEQ ID NO: 2809 - protein, 13 aa, Madurella mycetomatis
MCLRYPGSPCWKR

SEQ ID NO: 2810 - protein, 14 aa, Madurella mycetomatis
RCVAEGGSCWIAKR

SEQ ID NO: 2811 - protein, 13 aa, Madurella mycetomatis
WCLGFPGQPCWKR

SEQ ID NO: 2812 - protein, 13 aa, Madurella mycetomatis
WCLRFPGQPCWKR

SEQ ID NO: 2813 - protein, 14 aa, Madurella mycetomatis
WCSNRGQACDTVKR

SEQ ID NO: 2814 - protein, 17 aa, Madurella mycetomatis
WCTGFPGFPGQPCWKKR

SEQ ID NO: 2815 - protein, 15 aa, Madurella mycetomatis
WCTGFPGQPCWKEKR

SEQ ID NO: 2816 - protein, 14 aa, Madurella mycetomatis
WCTGFPGQPCWKKR

SEQ ID NO: 2817 - protein, 15 aa, Madurella mycetomatis
WCTGFPGQPCWKLKR

SEQ ID NO: 2818 - protein, 13 aa, Madurella mycetomatis
WCTGFPGQPCWKR

SEQ ID NO: 2819 - protein, 13 aa, Marssonina coronariae
CGKPGQPCGKAKR

SEQ ID NO: 2820 - protein, 13 aa, Marssonina coronariae
CGKPGQPCGKVKR

SEQ ID NO: 2821 - protein, 20 aa, Marssonina coronariae
WATLDARCNLVGGACYEAKR

SEQ ID NO: 2822 - protein, 9 aa, Massarina eburnea
KCRFVGQPC

SEQ ID NO: 2823 - protein, 12 aa, Massarina eburnea
KCRFVGQPCKRD

SEQ ID NO: 2824 - protein, 12 aa, Massarina eburnea
TCRFVGQPCKRD

SEQ ID NO: 2825 - protein, 13 aa, Melanomma pulvis-pyrius
CRFPGQPCSKEKR

SEQ ID NO: 2826 - protein, 12 aa, Melanomma pulvis-pyrius
CRFPGQPCSKKR

SEQ ID NO: 2827 - protein, 13 aa, Melanomma pulvis-pyrius
CRFPGQPCSKNKR

SEQ ID NO: 2828 - protein, 11 aa, Melanomma pulvis-pyrius
CRFPGQPCSKR

SEQ ID NO: 2829 - protein, 14 aa, Metarhizium acridum
VCNGPNILCWKKKR

SEQ ID NO: 2830 - protein, 12 aa, Metarhizium acridum
WCWQPGQPCWKR

SEQ ID NO: 2831 - protein, 14 aa, Metarhizium acridum
WCWQPGQPCWKVKR

SEQ ID NO: 2832 - protein, 14 aa, Metarhizium acridum
WCWRPGQPCWKAKR

SEQ ID NO: 2833 - protein, 14 aa, Metarhizium acridum
WCYRPGQPCWKAKR

SEQ ID NO: 2834 - protein, 14 aa, Metarhizium album
WCNRPGEPCWKAKR

SEQ ID NO: 2835 - protein, 14 aa, Metarhizium album
WCWRPGEPCWKAKR

SEQ ID NO: 2836 - protein, 14 aa, Metarhizium album
WCWRPGEPCWKVKR

SEQ ID NO: 2837 - protein, 14 aa, Metarhizium album
WCWRPGMPCWKRDS

SEQ ID NO: 2838 - protein, 14 aa, Metarhizium anisopliae
WCGRPGQPCWKAKR

SEQ ID NO: 2839 - protein, 14 aa, Metarhizium anisopliae
WCSAPGEPCWKDKR

SEQ ID NO: 2840 - protein, 14 aa, Metarhizium anisopliae
WCWRPGQPCWKAKR

SEQ ID NO: 2841 - protein, 14 aa, Metarhizium anisopliae
WCWRPGQPCWKVKR

SEQ ID NO: 2842 - protein, 14 aa, Metarhizium anisopliae
WCSAPGQPCWKAKR

SEQ ID NO: 2843 - protein, 14 aa, Metarhizium anisopliae
WCWAPGQPCWKAKR

SEQ ID NO: 2844 - protein, 14 aa, Metarhizium anisopliae
WCWQPGQPCWKDKR

SEQ ID NO: 2845 - protein, 14 aa, Metarhizium anisopliae
WCWRPGQPCWKVKR

SEQ ID NO: 2846 - protein, 14 aa, Metarhizium anisopliae
WCSAPGQPCWKAKR

SEQ ID NO: 2847 - protein, 14 aa, Metarhizium anisopliae
WCWAPGQPCWKAKR

SEQ ID NO: 2848 - protein, 14 aa, Metarhizium anisopliae
WCWQPGQPCWKDKR

SEQ ID NO: 2849 - protein, 14 aa, Metarhizium anisopliae
WCWRPGQPCWKVKR

SEQ ID NO: 2850 - protein, 14 aa, Metarhizium anisopliae
WCGAPGEPCWKAKR

SEQ ID NO: 2851 - protein, 14 aa, Metarhizium anisopliae
WCGGPGEPCWKDKR

SEQ ID NO: 2852 - protein, 14 aa, Metarhizium anisopliae
WCGSPGEPCWKDKR

SEQ ID NO: 2853 - protein, 14 aa, Metarhizium anisopliae
WCWAPGQPCWKAKR

SEQ ID NO: 2854 - protein, 14 aa, Metarhizium anisopliae
WCWRPGQPCWKVKR

SEQ ID NO: 2855 - protein, 14 aa, Metarhizium anisopliae
WCGAPGEPCWKAKR

SEQ ID NO: 2856 - protein, 14 aa, Metarhizium anisopliae
WCGGPGEPCWKDKR

SEQ ID NO: 2857 - protein, 14 aa, Metarhizium anisopliae
WCGSPGEPCWKDKR

SEQ ID NO: 2858 - protein, 14 aa, Metarhizium anisopliae
WCWAPGQPCWKAKR

SEQ ID NO: 2859 - protein, 14 aa, Metarhizium anisopliae
WCWRPGQPCWKVKR

SEQ ID NO: 2860 - protein, 14 aa, Metarhizium brunneum
WCGRPGQPCWKAKR

SEQ ID NO: 2861 - protein, 14 aa, Metarhizium brunneum
WCSAPGEPCWKDKR

SEQ ID NO: 2862 - protein, 14 aa, Metarhizium brunneum
WCSSPGEPCWKDKR

SEQ ID NO: 2863 - protein, 14 aa, Metarhizium brunneum
WCWRPGQPCWKAKR

SEQ ID NO: 2864 - protein, 14 aa, Metarhizium brunneum
WCWRPGQPCWKVKR

SEQ ID NO: 2865 - protein, 14 aa, Metarhizium brunneum
WCGRPGQPCWKAKR

SEQ ID NO: 2866 - protein, 14 aa, Metarhizium brunneum
WCSAPGEPCWKDKR

SEQ ID NO: 2867 - protein, 14 aa, Metarhizium brunneum
WCSSPGEPCWKDKR

SEQ ID NO: 2868 - protein, 14 aa, Metarhizium brunneum
WCWRPGQPCWKAKR

SEQ ID NO: 2869 - protein, 14 aa, Metarhizium brunneum
WCWRPGQPCWKVKR

SEQ ID NO: 2870 - protein, 14 aa, Metarhizium guizhouense
WCGAPGQPCWKAKR

SEQ ID NO: 2871 - protein, 14 aa, Metarhizium guizhouense
WCWQPGQPCWKDKR

SEQ ID NO: 2872 - protein, 14 aa, Metarhizium guizhouense
WCWRPGQPCWKAKR

SEQ ID NO: 2873 - protein, 14 aa, Metarhizium guizhouense
WCWRPGQPCWKVKR

SEQ ID NO: 2874 - protein, 14 aa, Metarhizium majus
WCWQPGQPCWKDKR

SEQ ID NO: 2875 - protein, 14 aa, Metarhizium majus
WCWRPGQPCWKAKR

SEQ ID NO: 2876 - protein, 14 aa, Metarhizium majus
WCWRPGQPCWKVKR

SEQ ID NO: 2877 - protein, 14 aa, Metarhizium rileyi
WCQRPGHDCWKAKR

SEQ ID NO: 2878 - protein, 14 aa, Metarhizium rileyi
WCWRPGQPCWKAKR

SEQ ID NO: 2879 - protein, 12 aa, Metarhizium rileyi
WCWRPGQPCWKR

SEQ ID NO: 2880 - protein, 14 aa, Metarhizium rileyi
WCWRPGQPCWKVKR

SEQ ID NO: 2881 - protein, 14 aa, Metarhizium rileyi
WCQRPGHDCWKAKR

SEQ ID NO: 2882 - protein, 14 aa, Metarhizium rileyi
WCWRPGQPCWKAKR

SEQ ID NO: 2883 - protein, 12 aa, Metarhizium rileyi
WCWRPGQPCWKR

SEQ ID NO: 2884 - protein, 14 aa, Metarhizium rileyi
WCWRPGQPCWKVKR

SEQ ID NO: 2885 - protein, 14 aa, Metarhizium robertsii
WCNAPGQPCWKAKR

SEQ ID NO: 2886 - protein, 14 aa, Metarhizium robertsii
WCWQPGQPCWKDKR

SEQ ID NO: 2887 - protein, 14 aa, Metarhizium robertsii
WCWRPGQPCWKAKR

SEQ ID NO: 2888 - protein, 14 aa, Metarhizium robertsii
WCWRPGQPCWKVKR

SEQ ID NO: 2889 - protein, 14 aa, Metarhizium robertsii
WCNAPGQPCWKAKR

SEQ ID NO: 2890 - protein, 14 aa, Metarhizium robertsii
WCWQPGQPCWKDKR

SEQ ID NO: 2891 - protein, 14 aa, Metarhizium robertsii
WCWRPGQPCWKAKR

SEQ ID NO: 2892 - protein, 14 aa, Metarhizium robertsii
WCWRPGQPCWKVKR

SEQ ID NO: 2893 - protein, 13 aa, Moelleriella libera
CWHPDGLFAKVKR

SEQ ID NO: 2894 - protein, 13 aa, Moelleriella libera
WCADQGFFCMVKR

SEQ ID NO: 2895 - protein, 14 aa, Moelleriella libera
WCMRRYATCWKAKR

SEQ ID NO: 2896 - protein, 13 aa, Mollisia scopiformis
CGYPGQPCGKAKR

SEQ ID NO: 2897 - protein, 13 aa, Mollisia scopiformis
CGYPGQPCGKLKR

SEQ ID NO: 2898 - protein, 13 aa, Mollisia scopiformis
CGYPGQPCGKVKR

SEQ ID NO: 2899 - protein, 13 aa, Monilinia fructicola
CNMVGGACFEAKR

SEQ ID NO: 2900 - protein, 11 aa, Monilinia fructicola
WCGRPGQGCKR

SEQ ID NO: 2901 - protein, 14 aa, Monilinia fructicola
WCGRPGQGCRKAKR

SEQ ID NO: 2902 - protein, 12 aa, Monilinia fructicola
WCGRPGQGCRKR

SEQ ID NO: 2903 - protein, 14 aa, Monilinia fructicola
WCGRPGQGCRKTKR

SEQ ID NO: 2904 - protein, 13 aa, Monilinia fructigena
CNMVGGACFEAKR

SEQ ID NO: 2905 - protein, 11 aa, Monilinia fructigena
WCGRPGQGCKR

SEQ ID NO: 2906 - protein, 14 aa, Monilinia fructigena
WCGRPGQGCRKAKR

SEQ ID NO: 2907 - protein, 14 aa, Monilinia fructigena
WCGRPGQGCRKTKR

SEQ ID NO: 2908 - protein, 13 aa, Monilinia laxa
CNMVGGACFEAKR

SEQ ID NO: 2909 - protein, 11 aa, Monilinia laxa
WCGRPGQGCKR

SEQ ID NO: 2910 - protein, 14 aa, Monilinia laxa
WCGRPGQGCRKAKR

SEQ ID NO: 2911 - protein, 14 aa, Monilinia laxa
WCGRPGQGCRKTKR

SEQ ID NO: 2912 - protein, 13 aa, Mytilinidion resinicola
CHLPGQSCSKDKR

SEQ ID NO: 2913 - protein, 15 aa, Mytilinidion resinicola
WGCHLPGQSCSKDKR

SEQ ID NO: 2914 - protein, 15 aa, Mytilinidion resinicola
WGCHLPGQSCSKNKR

SEQ ID NO: 2915 - protein, 14 aa, Mytilinidion resinicola
YCHLPGQSCNKDKR

SEQ ID NO: 2916 - protein, 14 aa, Mytilinidion resinicola
YCHLPGQSCSKDKR

SEQ ID NO: 2917 - protein, 14 aa, Mytilinidion resinicola
YCHRPGQSCSKEKR

SEQ ID NO: 2918 - protein, 13 aa, Neofusicoccum parvum
CNEPGEACYQVKR

SEQ ID NO: 2919 - protein, 14 aa, Neofusicoccum parvum
WCRWKGQPCSKAKR

SEQ ID NO: 2920 - protein, 13 aa, Neofusicoccum parvum
WCRWKGQPCSKKR

SEQ ID NO: 2921 - protein, 14 aa, Neofusicoccum parvum
WCRWKGQPCSKLKR

SEQ ID NO: 2922 - protein, 14 aa, Neonectria ditissima
WCIHPGQPCWKAKR

SEQ ID NO: 2923 - protein, 14 aa, Neonectria ditissima
WCIHPGQPCWKKRD

SEQ ID NO: 2924 - protein, 13 aa, Neonectria ditissima
WCKYPGQPCWKKR

SEQ ID NO: 2925 - protein, 14 aa, Neonectria ditissima
WCMHPGQPCWKAKR

SEQ ID NO: 2926 - protein, 14 aa, Neonectria ditissima
WCMHRGQPCWKAKR

SEQ ID NO: 2927 - protein, 14 aa, Neurospora crassa
WCRIHGQSCWKAKR

SEQ ID NO: 2928 - protein, 13 aa, Neurospora crassa
WCRIHGQSCWKKR

SEQ ID NO: 2929 - protein, 12 aa, Neurospora crassa
WCRIHGQSCWKR

SEQ ID NO: 2930 - protein, 14 aa, Neurospora crassa
WCRIHGQSCWKVKR

SEQ ID NO: 2931 - protein, 14 aa, Neurospora crassa
WCRIHGQSCWKAKR

SEQ ID NO: 2932 - protein, 13 aa, Neurospora crassa
WCRIHGQSCWKKR

SEQ ID NO: 2933 - protein, 12 aa, Neurospora crassa
WCRIHGQSCWKR

SEQ ID NO: 2934 - protein, 14 aa, Neurospora crassa
WCRIHGQSCWKVKR

SEQ ID NO: 2935 - protein, 15 aa, Neurospora tetrasperma
WCNMRLHPDRGCWKR

SEQ ID NO: 2936 - protein, 14 aa, Neurospora tetrasperma
WCRIHGQSCWKAKR

SEQ ID NO: 2937 - protein, 13 aa, Neurospora tetrasperma
WCRIHGQSCWKKR

SEQ ID NO: 2938 - protein, 12 aa, Neurospora tetrasperma
WCRIHGQSCWKR

SEQ ID NO: 2939 - protein, 14 aa, Neurospora tetrasperma
WCRIHGQSCWKVKR

SEQ ID NO: 2940 - protein, 13 aa, Neurospora tetrasperma
CNAPDGACTKATR

SEQ ID NO: 2941 - protein, 14 aa, Neurospora tetrasperma
WCRIHGQSCWKAKR

SEQ ID NO: 2942 - protein, 13 aa, Neurospora tetrasperma
WCRIHGQSCWKKR

SEQ ID NO: 2943 - protein, 12 aa, Neurospora tetrasperma
WCRIHGQSCWKR

SEQ ID NO: 2944 - protein, 14 aa, Neurospora tetrasperma
WCWIHGQSCWKVKR

SEQ ID NO: 2945 - protein, 13 aa, Ophiocordyceps camponoti-floridani
CLAEGGACWAAKR

SEQ ID NO: 2946 - protein, 13 aa, Ophiocordyceps camponoti-floridani
CSQRGEACWHQKR

SEQ ID NO: 2947 - protein, 14 aa, Ophiocordyceps camponoti-floridani
WCKRPNSICPKVKR

SEQ ID NO: 2948 - protein, 14 aa, Ophiocordyceps camponoti-floridani
WCTRPNSICSKVKR

SEQ ID NO: 2949 - protein, 14 aa, Ophiocordyceps camponoti-floridani
WCTRPNSQCGPKKR

SEQ ID NO: 2950 - protein, 16 aa, Ophiocordyceps camponoti-floridani
WCTRPNSQCGPKMAKR

SEQ ID NO: 2951 - protein, 14 aa, Ophiocordyceps camponoti-floridani
WCYRPNSQCGPKKR

SEQ ID NO: 2952 - protein, 13 aa, Ophiocordyceps camponoti-rufipedis
CHAEGGACWAAKR

SEQ ID NO: 2953 - protein, 13 aa, Ophiocordyceps camponoti-rufipedis
CSQRGEACWHQKR

SEQ ID NO: 2954 - protein, 14 aa, Ophiocordyceps camponoti-rufipedis
WCKRPNSICSKAKR

SEQ ID NO: 2955 - protein, 14 aa, Ophiocordyceps camponoti-rufipedis
WCKRPNSICSKVKR

SEQ ID NO: 2956 - protein, 16 aa, Ophiocordyceps camponoti-rufipedis
WCKRPNSQCGTAMEKR

SEQ ID NO: 2957 - protein, 15 aa, Ophiocordyceps camponoti-rufipedis
WCTRPLSNCPTVVKR

SEQ ID NO: 2958 - protein, 12 aa, Ophiostoma piceae
LCTWMGQGCLKR

SEQ ID NO: 2959 - protein, 14 aa, Ophiostoma piceae
WCPMVGQPCWKAKR

SEQ ID NO: 2960 - protein, 14 aa, Ophiostoma piceae
WCPMVGQPCWKVKR

SEQ ID NO: 2961 - protein, 14 aa, Penicilliopsis zonata
WCWQPGQGCEKIKR

SEQ ID NO: 2962 - protein, 14 aa, Penicilliopsis zonata
WCWQPGQGCYMLKR

SEQ ID NO: 2963 - protein, 14 aa, Penicillium antarcticum
WCGHPGQGCFKAKR

SEQ ID NO: 2964 - protein, 14 aa, Penicillium antarcticum
WCGHPGQGCYMMKR

SEQ ID NO: 2965 - protein, 14 aa, Penicillium arizonense
WCGHPGQGCFKAKR

SEQ ID NO: 2966 - protein, 14 aa, Penicillium arizonense
WCGHPGQGCYMMKR

SEQ ID NO: 2967 - protein, 14 aa, Penicillium brasilianum
WCAHPGQGCAKVKR

SEQ ID NO: 2968 - protein, 14 aa, Penicillium brasilianum
WCAHPGQGCYMMKR

SEQ ID NO: 2969 - protein, 12 aa, Penicillium brasilianum
WCGHPGQGCAKR

SEQ ID NO: 2970 - protein, 14 aa, Penicillium brasilianum
WCAHPGQGCAKVKR

SEQ ID NO: 2971 - protein, 14 aa, Penicillium brasilianum
WCAHPGQGCYMMKR

SEQ ID NO: 2972 - protein, 12 aa, Penicillium brasilianum
WCGHPGQGCAKR

SEQ ID NO: 2973 - protein, 11 aa, Penicillium chrysogenum
WCGHIGQGCKR

SEQ ID NO: 2974 - protein, 14 aa, Penicillium chrysogenum
WCGHIGQGCYKAKR

SEQ ID NO: 2975 - protein, 14 aa, Penicillium decumbens
WCGHAGQGCSKAKR

SEQ ID NO: 2976 - protein, 14 aa, Penicillium decumbens
WCGHPGQGCYMYKR

SEQ ID NO: 2977 - protein, 11 aa, Penicillium digitatum
WCGHIGQGCKR

SEQ ID NO: 2978 - protein, 14 aa, Penicillium digitatum
WCGHIGQGCYKAKR

SEQ ID NO: 2979 - protein, 11 aa, Penicillium digitatum
WCGHIGQGCKR

SEQ ID NO: 2980 - protein, 14 aa, Penicillium digitatum
WCGHIGQGCYKAKR

SEQ ID NO: 2981 - protein, 14 aa, Penicillium rolfsii
WCAHPGQGCAKVKR

SEQ ID NO: 2982 - protein, 14 aa, Penicillium rolfsii
WCGHPGQGCYMMKR

SEQ ID NO: 2983 - protein, 11 aa, Penicillium roqueforti
WCGHIGQGCKR

SEQ ID NO: 2984 - protein, 14 aa, Penicillium roqueforti
WCGHIGQGCYKAKR

SEQ ID NO: 2985 - protein, 14 aa, Penicillium steckii
WCGHPGQGCYKVKR

SEQ ID NO: 2986 - protein, 14 aa, Penicillium steckii
WCGHPGQGCYMMKR

SEQ ID NO: 2987 - protein, 14 aa, Penicillium subrubescens
WCAHPGQGCAKVKR

SEQ ID NO: 2988 - protein, 14 aa, Penicillium subrubescens
WCAHPGQGCYMMKR

SEQ ID NO: 2989 - protein, 12 aa, Penicillium subrubescens
WCGHPGQGCAKR

SEQ ID NO: 2990 - protein, 14 aa, Phaeoacremonium minimum
WCTKHGQSCWKAKR

SEQ ID NO: 2991 - protein, 13 aa, Phaeoacremonium minimum
WCTKHGQSCWKKR

SEQ ID NO: 2992 - protein, 12 aa, Phaeoacremonium minimum
WCTKHGQSCWKR

SEQ ID NO: 2993 - protein, 14 aa, Phaeoacremonium minimum
WCTKHGQSCWKVKR

SEQ ID NO: 2994 - protein, 14 aa, Phialemoniopsis curvata
WCPIRGQPCWKAKR

SEQ ID NO: 2995 - protein, 12 aa, Phialemoniopsis curvata
WCPIRGQPCWKR

SEQ ID NO: 2996 - protein, 14 aa, Phialemoniopsis curvata
WCPIRGQPCWKVKR

SEQ ID NO: 2997 - protein, 13 aa, Phialocephala subalpina
CGYPGQPCGKAKR

SEQ ID NO: 2998 - protein, 13 aa, Phialocephala subalpina
CGYPGQPCGKVKR

SEQ ID NO: 2999 - protein, 13 aa, Phialocephala subalpina
CGYPGQPCNKAKR

SEQ ID NO: 3000 - protein, 13 aa, Phialocephala subalpina
CGYPGQPCSKAKR

SEQ ID NO: 3001 - protein, 13 aa, Phialocephala subalpina
CGYPGQPCSKVKR

SEQ ID NO: 3002 - protein, 13 aa, Phialocephala subalpina
CGYRGQPCSKLKR

SEQ ID NO: 3003 - protein, 12 aa, Pleomassaria siparia
CHFPGQPCMAKR

SEQ ID NO: 3004 - protein, 12 aa, Pleomassaria siparia
CHFPGQPCMTKR

SEQ ID NO: 3005 - protein, 12 aa, Pleomassaria siparia
CHFPGQPCSSKR

SEQ ID NO: 3006 - protein, 13 aa, Pleomassaria siparia
CHFPGQPCTKEKR

SEQ ID NO: 3007 - protein, 13 aa, Pochonia chlamydosporia
ICNGPGILCWKKR

SEQ ID NO: 3008 - protein, 14 aa, Pochonia chlamydosporia
RCWRPGEPCFKVKR

SEQ ID NO: 3009 - protein, 14 aa, Pochonia chlamydosporia
WCNRPGQSCWKAKR

SEQ ID NO: 3010 - protein, 14 aa, Pochonia chlamydosporia
WCWRPGQPCWKAKR

SEQ ID NO: 3011 - protein, 12 aa, Pochonia chlamydosporia
WCWRPGQPCWKR

SEQ ID NO: 3012 - protein, 14 aa, Pochonia chlamydosporia
WCWRPGQSCWKAKR

SEQ ID NO: 3013 - protein, 13 aa, Pochonia chlamydosporia
ICNGPGILCWKKR

SEQ ID NO: 3014 - protein, 14 aa, Pochonia chlamydosporia
WCHRPGQSCWKAKR

SEQ ID NO: 3015 - protein, 14 aa, Pochonia chlamydosporia
WCWRPGEPCFKVKR

SEQ ID NO: 3016 - protein, 14 aa, Pochonia chlamydosporia
WCWRPGQPCWKAKR

SEQ ID NO: 3017 - protein, 12 aa, Pochonia chlamydosporia
WCWRPGQPCWKR

SEQ ID NO: 3018 - protein, 14 aa, Pochonia chlamydosporia
WCWRPGQSCWKAKR

SEQ ID NO: 3019 - protein, 12 aa, Pochonia chlamydosporia
WCWRPGQSCWKR

SEQ ID NO: 3020 - protein, 13 aa, Podospora comata
CTAEDGACTKAKR

SEQ ID NO: 3021 - protein, 13 aa, Podospora comata
WCLRFVGQSCWKR

SEQ ID NO: 3022 - protein, 14 aa, Podospora comata
WCNTEGQACNTVAR

SEQ ID NO: 3023 - protein, 14 aa, Polychaeton citri
FCGAPGASCAKVKR

SEQ ID NO: 3024 - protein, 13 aa, Polyplosphaeria fusca
CGMPGAPCNRLKR

SEQ ID NO: 3025 - protein, 13 aa, Polyplosphaeria fusca
CLFSGQSCSAAKR

SEQ ID NO: 3026 - protein, 12 aa, Polyplosphaeria fusca
CRFPGSFCGKKR

SEQ ID NO: 3027 - protein, 13 aa, Polyplosphaeria fusca
CRFPGSFCGKSKR

SEQ ID NO: 3028 - protein, 12 aa, Polyplosphaeria fusca
CRYPGSFCGRKR

SEQ ID NO: 3029 - protein, 13 aa, Polyplosphaeria fusca
CSFGDDTCAKIKR

SEQ ID NO: 3030 - protein, 14 aa, Pseudogymnoascus destructans
FCQRPGQLCGKVKR

SEQ ID NO: 3031 - protein, 14 aa, Pseudogymnoascus destructans
FCWRLGQPCDKVKR

SEQ ID NO: 3032 - protein, 14 aa, Pseudogymnoascus destructans
FCWRPGQICEKAKR

SEQ ID NO: 3033 - protein, 14 aa, Pseudogymnoascus destructans
FCWRPGQPCGKAKR

SEQ ID NO: 3034 - protein, 14 aa, Pseudogymnoascus destructans
FCWRPGQPCGKVKR

SEQ ID NO: 3035 - protein, 14 aa, Pseudogymnoascus destructans
FCQRPGQLCGKVKR

SEQ ID NO: 3036 - protein, 14 aa, Pseudogymnoascus destructans
FCWRLGQPCDKVKR

SEQ ID NO: 3037 - protein, 14 aa, Pseudogymnoascus destructans
FCWRPGQICEKAKR

SEQ ID NO: 3038 - protein, 14 aa, Pseudogymnoascus destructans
FCWRPGQPCGKAKR

SEQ ID NO: 3039 - protein, 14 aa, Pseudogymnoascus destructans
FCWRPGQPCGKVKR

SEQ ID NO: 3040 - protein, 13 aa, Pseudogymnoascus sp.
  source 1..13: note = 03VT05
CWRPGQPCGKAKR

SEQ ID NO: 3041 - protein, 13 aa, Pseudogymnoascus sp.
  source 1..13: note = 03VT05
CWRPGQPCGKVKR

SEQ ID NO: 3042 - protein, 14 aa, Pseudogymnoascus sp.
  source 1..14: note = 03VT05
ICWRPGQPCGKAKR

SEQ ID NO: 3043 - protein, 13 aa, Pseudogymnoascus sp.
  source 1..13: note = 05NY08
CWRPGQPCGKAKR

SEQ ID NO: 3044 - protein, 13 aa, Pseudogymnoascus sp.
  source 1..13: note = 05NY08
CWRPGQPCGKVKR

SEQ ID NO: 3045 - protein, 14 aa, Pseudogymnoascus sp.
  source 1..14: note = 05NY08
ICWRPGQPCGKAKR

SEQ ID NO: 3046 - protein, 13 aa, Pseudogymnoascus sp.
  source 1..13: note = 24MN13
CWRPGQPCGKVKR

SEQ ID NO: 3047 - protein, 14 aa, Pseudogymnoascus sp.
  source 1..14: note = 24MN13
ICWRPGQPCGKAKR

SEQ ID NO: 3048 - protein, 8 aa, Pseudogymnoascus sp.
  source 1..8: note = 24MN13
QPCGKAKR

SEQ ID NO: 3049 - protein, 14 aa, Pseudogymnoascus sp.
  source 1..14: note = 23342-1-I1
FCWRPGQPCGKAKR

SEQ ID NO: 3050 - protein, 14 aa, Pseudogymnoascus sp.
  source 1..14: note = 23342-1-I1
FCWRPGQPCGKVKR

SEQ ID NO: 3051 - protein, 13 aa, Pseudogymnoascus sp.
  source 1..13: note = VKM F-103
CWRPGQPCGKAKR

SEQ ID NO: 3052 - protein, 13 aa, Pseudogymnoascus sp.
  source 1..13: note = VKM F-103
CWRPGQPCGKVKR

SEQ ID NO: 3053 - protein, 14 aa, Pseudogymnoascus sp.
  source 1..14: note = VKM F-103
ICWRPGQPCGKAKR

SEQ ID NO: 3054 - protein, 13 aa, Pseudogymnoascus sp.
  source 1..13: note = VKM F-3557
CWRPGQPCGKAKR

SEQ ID NO: 3055 - protein, 13 aa, Pseudogymnoascus sp.
  source 1..13: note = VKM F-3557
CWRPGQPCGKVKR

SEQ ID NO: 3056 - protein, 14 aa, Pseudogymnoascus sp.
  source 1..14: note = VKM F-3557
ICWRPGQPCGKAKR

SEQ ID NO: 3057 - protein, 13 aa, Pseudogymnoascus sp.
  source 1..13: note = VKM F-3775
CWRPGQPCGKAKR

SEQ ID NO: 3058 - protein, 13 aa, Pseudogymnoascus sp.
  source 1..13: note = VKM F-3775
CWRPGQPCGKVKR

SEQ ID NO: 3059 - protein, 13 aa, Pseudogymnoascus sp.
  source 1..13: note = VKM F-4246
CWLPGQPCGKAKR

SEQ ID NO: 3060 - protein, 13 aa, Pseudogymnoascus sp.
  source 1..13: note = VKM F-4246
CWLPGQPCGKVKR

SEQ ID NO: 3061 - protein, 13 aa, Pseudogymnoascus sp.
  source 1..13: note = VKM F-4281
CHRPGQPCGKAKR

SEQ ID NO: 3062 - protein, 13 aa, Pseudogymnoascus sp.
  source 1..13: note = VKM F-4281
CHRPGQPCGKVKR

SEQ ID NO: 3063 - protein, 14 aa, Pseudogymnoascus sp.
  source 1..14: note = VKM F-4281
FCHRPGQPCGKLKR

SEQ ID NO: 3064 - protein, 14 aa, Pseudogymnoascus sp.
  source 1..14: note = VKM F-4281
FCHRPGRPCGKAKR

SEQ ID NO: 3065 - protein, 13 aa, Pseudogymnoascus sp.
  source 1..13: note = VKM F-4513
CWLPGQPCGKAKR

SEQ ID NO: 3066 - protein, 13 aa, Pseudogymnoascus sp.
  source 1..13: note = VKM F-4513
CWLPGQPCGKVKR

SEQ ID NO: 3067 - protein, 13 aa, Pseudogymnoascus sp.
  source 1..13: note = VKM F-4514
CWRPGQPCGKAKR

SEQ ID NO: 3068 - protein, 13 aa, Pseudogymnoascus sp.
  source 1..13: note = VKM F-4514
CWRPGQPCGKVKR

SEQ ID NO: 3069 - protein, 14 aa, Pseudogymnoascus sp.
  source 1..14: note = VKM F-4514
ICWRPGQPCGKAKR

SEQ ID NO: 3070 - protein, 14 aa, Pseudogymnoascus sp.
  source 1..14: note = VKM F-4515
YCWRPGQPCGKAKR

SEQ ID NO: 3071 - protein, 14 aa, Pseudogymnoascus sp.
  source 1..14: note = VKM F-4515
YCWRPGQPCGKVKR

SEQ ID NO: 3072 - protein, 13 aa, Pseudogymnoascus sp.
  source 1..13: note = VKM F-4516
CWRPGQPCGKAKR

SEQ ID NO: 3073 - protein, 13 aa, Pseudogymnoascus sp.
  source 1..13: note = VKM F-4516
CWRPGQPCGKVKR

SEQ ID NO: 3074 - protein, 14 aa, Pseudogymnoascus sp.
  source 1..14: note = VKM F-4516
ICWRPGQPCGKAKR

SEQ ID NO: 3075 - protein, 14 aa, Pseudogymnoascus sp.
  source 1..14: note = VKM F-4517
YCWRPGQPCGKAKR

SEQ ID NO: 3076 - protein, 14 aa, Pseudogymnoascus sp.
  source 1..14: note = VKM F-4517
YCWRPGQPCGKVKR

SEQ ID NO: 3077 - protein, 14 aa, Pseudogymnoascus sp.
  source 1..14: note = VKM F-4518
FCWRPGQPCGKAKR

SEQ ID NO: 3078 - protein, 14 aa, Pseudogymnoascus sp.
  source 1..14: note = VKM F-4518
FCWRPGQPCGKVKR

SEQ ID NO: 3079 - protein, 13 aa, Pseudogymnoascus sp.
  source 1..13: note = VKM F-4519
CWRPGQPCGKAKR

SEQ ID NO: 3080 - protein, 13 aa, Pseudogymnoascus sp.
  source 1..13: note = VKM F-4519
CWRPGQPCGKVKR

SEQ ID NO: 3081 - protein, 14 aa, Pseudogymnoascus sp.
  source 1..14: note = VKM F-4519
ICWRPGQPCGKAKR

SEQ ID NO: 3082 - protein, 14 aa, Pseudogymnoascus sp.
  source 1..14: note = VKM F-4520
FCWRPGQPCGKAKR

SEQ ID NO: 3083 - protein, 14 aa, Pseudogymnoascus sp.
  source 1..14: note = VKM F-4520
FCWRPGQPCGKVKR

SEQ ID NO: 3084 - protein, 13 aa, Pseudogymnoascus sp.
  source 1..13: note = WSF 3629
CWRPGQPCGIVKR

SEQ ID NO: 3085 - protein, 13 aa, Pseudogymnoascus sp.
  source 1..13: note = WSF 3629
CWRPGQPCGKAKR

SEQ ID NO: 3086 - protein, 13 aa, Pseudogymnoascus sp.
  source 1..13: note = WSF 3629
CWRPGQPCGKVKR

SEQ ID NO: 3087 - protein, 14 aa, Pseudogymnoascus sp.
  source 1..14: note = WSF 3629
ICWRPGQPCGKAKR

SEQ ID NO: 3088 - protein, 13 aa, Pseudogymnoascus verrucosus
CWRPGQPCGKAKR

SEQ ID NO: 3089 - protein, 13 aa, Pseudogymnoascus verrucosus
CWRPGQPCGKVKR

SEQ ID NO: 3090 - protein, 14 aa, Pseudogymnoascus verrucosus
ICWRPGQPCGKAKR

SEQ ID NO: 3091 - protein, 11 aa, Purpureocillium lilacinum
WCNRPGQPCKR

SEQ ID NO: 3092 - protein, 11 aa, Purpureocillium lilacinum
WCTRPGQPCKR

SEQ ID NO: 3093 - protein, 11 aa, Purpureocillium lilacinum
WCTRRGQPCKR

SEQ ID NO: 3094 - protein, 14 aa, Purpureocillium lilacinum
WCYRPGQPCRKAKR

SEQ ID NO: 3095 - protein, 11 aa, Purpureocillium lilacinum
WCNRPGQPCKR

SEQ ID NO: 3096 - protein, 11 aa, Purpureocillium lilacinum
WCTRPGQPCKR

SEQ ID NO: 3097 - protein, 11 aa, Purpureocillium lilacinum
WCTRRGQPCKR

SEQ ID NO: 3098 - protein, 14 aa, Purpureocillium lilacinum
WCYRPGQPCRKAKR

SEQ ID NO: 3099 - protein, 11 aa, Purpureocillium lilacinum
WCNRPGQPCKR

SEQ ID NO: 3100 - protein, 11 aa, Purpureocillium lilacinum
WCTRPGQPCKR

SEQ ID NO: 3101 - protein, 11 aa, Purpureocillium lilacinum
WCTRRGQPCKR

SEQ ID NO: 3102 - protein, 14 aa, Purpureocillium lilacinum
WCYRPGQPCRKAKR

SEQ ID NO: 3103 - protein, 14 aa, Pyricularia grisea
HCNEAGEACDVAKR

SEQ ID NO: 3104 - protein, 12 aa, Pyricularia grisea
WCPRRGQPCWKR

SEQ ID NO: 3105 - protein, 14 aa, Pyricularia grisea
WCPRRGQPCWKVKR

SEQ ID NO: 3106 - protein, 14 aa, Pyricularia oryzae
HCNSAGEACDVAKR

SEQ ID NO: 3107 - protein, 12 aa, Pyricularia oryzae
WCPRRGQPCWKR

SEQ ID NO: 3108 - protein, 14 aa, Pyricularia oryzae
WCPRRGQPCWKVKR

SEQ ID NO: 3109 - protein, 14 aa, Pyricularia oryzae
HCNSAGEACDVAKR

SEQ ID NO: 3110 - protein, 12 aa, Pyricularia oryzae
WCPRRGQPCWKR

SEQ ID NO: 3111 - protein, 14 aa, Pyricularia oryzae
WCPRRGQPCWKVKR

SEQ ID NO: 3112 - protein, 14 aa, Pyricularia oryzae
HCNSAGEACDVAKR

SEQ ID NO: 3113 - protein, 12 aa, Pyricularia oryzae
WCPRRGQPCWKR

SEQ ID NO: 3114 - protein, 14 aa, Pyricularia oryzae
WCPRRGQPCWKVKR

SEQ ID NO: 3115 - protein, 14 aa, Pyricularia oryzae
HCNSAGEACDVAKR

SEQ ID NO: 3116 - protein, 12 aa, Pyricularia oryzae
WCPRRGQPCWKR

SEQ ID NO: 3117 - protein, 14 aa, Pyricularia oryzae
WCPRRGQPCWKVKR

SEQ ID NO: 3118 - protein, 12 aa, Pyricularia pennisetigena
WCPRRGQPCWKR

SEQ ID NO: 3119 - protein, 14 aa, Pyricularia pennisetigena
WCPRRGQPCWKVKR

SEQ ID NO: 3120 - protein, 14 aa, Pyricularia sp.
  source 1..14: note = CBS 133598
HCNSAGEACDVAKR

SEQ ID NO: 3121 - protein, 12 aa, Pyricularia sp.
  source 1..12: note = CBS 133598
WCPRRGQPCWKR

SEQ ID NO: 3122 - protein, 14 aa, Pyricularia sp.
  source 1..14: note = CBS 133598
WCPRRGQPCWKVKR

SEQ ID NO: 3123 - protein, 13 aa, Ramularia collo-cygni
CGAPGVACHKARR

SEQ ID NO: 3124 - protein, 13 aa, Ramularia collo-cygni
CGIPGSPCARLKR

SEQ ID NO: 3125 - protein, 13 aa, Ramularia collo-cygni
CNAPGGACDIAKR

SEQ ID NO: 3126 - protein, 14 aa, Ramularia collo-cygni
FCGPRGVSCAKAKR

SEQ ID NO: 3127 - protein, 14 aa, Ramularia collo-cygni
FCGPRGVSCAKTKR

SEQ ID NO: 3128 - protein, 14 aa, Ramularia collo-cygni
FCGPRGVSCAKVKR

SEQ ID NO: 3129 - protein, 13 aa, Rhizodiscina lignyota
CNKDGQPCAKAKR

SEQ ID NO: 3130 - protein, 13 aa, Rhizodiscina lignyota
CYKEGGKCQKAKR

SEQ ID NO: 3131 - protein, 14 aa, Rhizodiscina lignyota
LCHLVGQPCLKKKR

SEQ ID NO: 3132 - protein, 21 aa, Rutstroemia sp.
  source 1..21: note = NJR-2017a BBW
FDEAVVKRCNMVGGACYEAKR

SEQ ID NO: 3133 - protein, 13 aa, Rutstroemia sp.
  source 1..13: note = NJR-2017a BBW
WCGRPGQPCKEKR

SEQ ID NO: 3134 - protein, 11 aa, Rutstroemia sp.
  source 1..11: note = NJR-2017a BBW
WCGRPGQPCKR

SEQ ID NO: 3135 - protein, 14 aa, Rutstroemia sp.
  source 1..14: note = NJR-2017a BBW
WCGRPGQPCRKAKR

SEQ ID NO: 3136 - protein, 21 aa, Rutstroemia sp.
  source 1..21: note = NJR-2017a BVV2
FDEAVVKRCNMVGGACYEAKR

SEQ ID NO: 3137 - protein, 13 aa, Rutstroemia sp.
  source 1..13: note = NJR-2017a BVV2
WCGRPGQPCKEKR

SEQ ID NO: 3138 - protein, 11 aa, Rutstroemia sp.
  source 1..11: note = NJR-2017a BVV2
WCGRPGQPCKR

SEQ ID NO: 3139 - protein, 14 aa, Rutstroemia sp.
  source 1..14: note = NJR-2017a BVV2
WCGRPGQPCRKAKR

SEQ ID NO: 3140 - protein, 14 aa, Rutstroemia sp.
  source 1..14: note = NJR-2017a BVV2
WCGRPGQPCRKVRR

SEQ ID NO: 3141 - protein, 21 aa, Rutstroemia sp.
  source 1..21: note = NJR-2017a WRK4
FDEAVVKRCNMVGGACYEAKR

SEQ ID NO: 3142 - protein, 13 aa, Rutstroemia sp.
  source 1..13: note = NJR-2017a WRK4
WCGRPGQPCKEKR

SEQ ID NO: 3143 - protein, 11 aa, Rutstroemia sp.
  source 1..11: note = NJR-2017a WRK4
WCGRPGQPCKR

SEQ ID NO: 3144 - protein, 14 aa, Rutstroemia sp.
  source 1..14: note = NJR-2017a WRK4
WCGRPGQPCRKAKR

SEQ ID NO: 3145 - protein, 14 aa, Saccharata proteae
FCHLPGQPCSKAKR

SEQ ID NO: 3146 - protein, 14 aa, Saccharata proteae
FCHLPGQPCSKLKR

SEQ ID NO: 3147 - protein, 14 aa, Saccharata proteae
FCHLPGQPCSKTKR

SEQ ID NO: 3148 - protein, 14 aa, Sclerotinia borealis
RCNMVGGACFEAKR

SEQ ID NO: 3149 - protein, 11 aa, Sclerotinia borealis
WCGRPGQACKR

SEQ ID NO: 3150 - protein, 13 aa, Sclerotinia borealis
WCGRPGQPCKEKR

SEQ ID NO: 3151 - protein, 11 aa, Sclerotinia borealis
WCGRPGQPCKR

SEQ ID NO: 3152 - protein, 14 aa, Sclerotinia borealis
WCGRPGQPCRKAKR

SEQ ID NO: 3153 - protein, 14 aa, Sclerotinia borealis
WCGRPGQPCRKNKR

SEQ ID NO: 3154 - protein, 14 aa, Sclerotinia sclerotiorum
RCNMVGGACFEAKR

SEQ ID NO: 3155 - protein, 13 aa, Sclerotinia sclerotiorum
WCGRPGQPCKEKR

SEQ ID NO: 3156 - protein, 11 aa, Sclerotinia sclerotiorum
WCGRPGQPCKR

SEQ ID NO: 3157 - protein, 14 aa, Sclerotinia sclerotiorum
WCGRPGQPCRKAKR

SEQ ID NO: 3158 - protein, 14 aa, Sclerotinia sclerotiorum
WCGRPGQPCRKNKR

SEQ ID NO: 3159 - protein, 13 aa, Sclerotinia sclerotiorum
CNMVGGACFEAKR

SEQ ID NO: 3160 - protein, 13 aa, Sclerotinia sclerotiorum
WCGRPGQPCKEKR

SEQ ID NO: 3161 - protein, 11 aa, Sclerotinia sclerotiorum
WCGRPGQPCKR

SEQ ID NO: 3162 - protein, 14 aa, Sclerotinia sclerotiorum
WCGRPGQPCRKAKR

SEQ ID NO: 3163 - protein, 14 aa, Sclerotinia sclerotiorum
WCGRPGQPCRKNKR

SEQ ID NO: 3164 - protein, 13 aa, Sodiomyces alkalinus
CTKPGQPCWKNKR

SEQ ID NO: 3165 - protein, 11 aa, Sodiomyces alkalinus
CTKPGQPCWKR

SEQ ID NO: 3166 - protein, 14 aa, Sordaria macrospora
WCRIHGQSCWKAKR

SEQ ID NO: 3167 - protein, 15 aa, Sordaria macrospora
WCRIHGQSCWKKAKR

SEQ ID NO: 3168 - protein, 13 aa, Sordaria macrospora
WCRIHGQSCWKKR

SEQ ID NO: 3169 - protein, 12 aa, Sordaria macrospora
WCRIHGQSCWKR

SEQ ID NO: 3170 - protein, 14 aa, Sordaria macrospora
WCRIHGQSCWKVKR

SEQ ID NO: 3171 - protein, 14 aa, Sordaria macrospora
WCRIHGQSCWKAKR

SEQ ID NO: 3172 - protein, 15 aa, Sordaria macrospora
WCRIHGQSCWKKAKR

SEQ ID NO: 3173 - protein, 13 aa, Sordaria macrospora
WCRIHGQSCWKKR

SEQ ID NO: 3174 - protein, 12 aa, Sordaria macrospora
WCRIHGQSCWKR

SEQ ID NO: 3175 - protein, 14 aa, Sordaria macrospora
WCRIHGQSCWKVKR

SEQ ID NO: 3176 - protein, 14 aa, unidentified
  REGION 1..14: note = TPA: Pheromone PPGAPutative uncharacterized protein
WCRFAGRICPPTKR

SEQ ID NO: 3177 - protein, 14 aa, unidentified
  REGION 1..14: note = TPA: Pheromone PPGAPutative uncharacterized protein
WCRFRGQVCGKAKR

SEQ ID NO: 3178 - protein, 12 aa, Sporothrix brasiliensis
YCPLKGQSCWKR

SEQ ID NO: 3179 - protein, 14 aa, Sporothrix brasiliensis
YCPLKGQSCWKYKR

SEQ ID NO: 3180 - protein, 14 aa, Sporothrix brasiliensis
YCPLPGQPCWKNKR

SEQ ID NO: 3181 - protein, 14 aa, Sporothrix brasiliensis
YCQQAGQSCYQVKR

SEQ ID NO: 3182 - protein, 13 aa, Sporothrix insectorum
CYGPGGHCAAAKR

SEQ ID NO: 3183 - protein, 14 aa, Sporothrix insectorum
FCMWFGQSCWKVKR

SEQ ID NO: 3184 - protein, 13 aa, Sporothrix insectorum
FCMWFGQSCWRKR

SEQ ID NO: 3185 - protein, 12 aa, Sporothrix schenckii
YCPLKGQSCWKR

SEQ ID NO: 3186 - protein, 14 aa, Sporothrix schenckii
YCPLPGQPCWKNKR

SEQ ID NO: 3187 - protein, 14 aa, Sporothrix schenckii
YCQSVGQSCYQVKR

SEQ ID NO: 3188 - protein, 12 aa, Sporothrix schenckii
YCPLKGQSCWKR

SEQ ID NO: 3189 - protein, 14 aa, Sporothrix schenckii
YCPLPGQPCWKNKR

SEQ ID NO: 3190 - protein, 14 aa, Sporothrix schenckii
YCQSVGQSCYQVKR

SEQ ID NO: 3191 - protein, 14 aa, Stachybotrys chartarum
WCTRPGQPCWKAKR

SEQ ID NO: 3192 - protein, 13 aa, Stachybotrys chartarum
WCTRPGQPCWKKR

SEQ ID NO: 3193 - protein, 14 aa, Stachybotrys chartarum
WCVRPGQPCWKVKR

SEQ ID NO: 3194 - protein, 14 aa, Stachybotrys chartarum
WCTRPGQPCWKAKR

SEQ ID NO: 3195 - protein, 13 aa, Stachybotrys chartarum
WCTRPGQPCWKKR

SEQ ID NO: 3196 - protein, 14 aa, Stachybotrys chartarum
WCVRPGQPCWKVKR

SEQ ID NO: 3197 - protein, 14 aa, Stachybotrys chartarum
WCTRPGQPCWKAKR

SEQ ID NO: 3198 - protein, 13 aa, Stachybotrys chartarum
WCTRPGQPCWKKR

SEQ ID NO: 3199 - protein, 14 aa, Stachybotrys chartarum
WCVRPGQPCWKVKR

SEQ ID NO: 3200 - protein, 14 aa, Stachybotrys chlorohalonata
WCTRPGQPCWKAKR

SEQ ID NO: 3201 - protein, 14 aa, Stachybotrys chlorohalonata
WCTRPGQPCWKEKR

SEQ ID NO: 3202 - protein, 14 aa, Stachybotrys chlorohalonata
WCVRPGQPCWKVKR

SEQ ID NO: 3203 - protein, 13 aa, Thermothielavioides terrestris
CESEGNACWTAKR

SEQ ID NO: 3204 - protein, 13 aa, Thermothielavioides terrestris
MCSRFVGESCYKR

SEQ ID NO: 3205 - protein, 14 aa, Thermothielavioides terrestris
WCSTEGQPCDTVKR

SEQ ID NO: 3206 - protein, 15 aa, Thermothielavioides terrestris
WCTFFLGQPCWKNKR

SEQ ID NO: 3207 - protein, 13 aa, Thermothielavioides terrestris
WCTFFLGQPCWKR

SEQ ID NO: 3208 - protein, 15 aa, Tothia fuscella
WRCFRRGQPCGKAKR

SEQ ID NO: 3209 - protein, 15 aa, Tothia fuscella
WRCFRRGQPCGKLKR

SEQ ID NO: 3210 - protein, 15 aa, Tothia fuscella
WRCFRRGQPCGKVKR

SEQ ID NO: 3211 - protein, 14 aa, Trichoderma arundinaceum
WCYRIGEPCWKAKR

SEQ ID NO: 3212 - protein, 14 aa, Trichoderma arundinaceum
WCYRIGEPCWKVKR

SEQ ID NO: 3213 - protein, 14 aa, Trichoderma arundinaceum
WCYRIGQPCWKAKR

SEQ ID NO: 3214 - protein, 14 aa, Trichoderma asperellum
WCWRVGESCWKAKR

SEQ ID NO: 3215 - protein, 14 aa, Trichoderma asperellum
WCWRVGESCWKAKR

SEQ ID NO: 3216 - protein, 14 aa, Trichoderma atroviride
WCWRVGESCWKAKR

SEQ ID NO: 3217 - protein, 14 aa, Trichoderma citrinoviride
WCFILGRQCWKTKR

SEQ ID NO: 3218 - protein, 14 aa, Trichoderma citrinoviride
WCYRIGEPCWKAKR

SEQ ID NO: 3219 - protein, 14 aa, Trichoderma citrinoviride
WCYRIGEPCWKLKR

SEQ ID NO: 3220 - protein, 14 aa, Trichoderma citrinoviride
WCYRIGQPCWKAKR

SEQ ID NO: 3221 - protein, 14 aa, Trichoderma gamsii
WCWRVGESCWKAKR

SEQ ID NO: 3222 - protein, 14 aa, Trichoderma gamsii
WCWRVGESCWKAKR

SEQ ID NO: 3223 - protein, 13 aa, Trichoderma guizhouense
CFQNGGDCQKAKR

SEQ ID NO: 3224 - protein, 14 aa, Trichoderma guizhouense
MCNSVGQPCWKAQR

SEQ ID NO: 3225 - protein, 14 aa, Trichoderma guizhouense
WCYRIGEGCWIPKR

SEQ ID NO: 3226 - protein, 14 aa, Trichoderma guizhouense
WCYRIGTPCWIPKR

SEQ ID NO: 3227 - protein, 14 aa, Trichoderma guizhouense
WCYRVGEGCWIPKR

SEQ ID NO: 3228 - protein, 14 aa, Trichoderma harzianum
MCNSVGQPCWKAER

SEQ ID NO: 3229 - protein, 14 aa, Trichoderma harzianum
WCYLLGMPCWIPKR

SEQ ID NO: 3230 - protein, 14 aa, Trichoderma harzianum
WCYRIGESCWIPKR

SEQ ID NO: 3231 - protein, 13 aa, Trichoderma harzianum
CFQNGGDCQKAKR

SEQ ID NO: 3232 - protein, 14 aa, Trichoderma harzianum
MCNSVGQPCWKAQR

SEQ ID NO: 3233 - protein, 14 aa, Trichoderma harzianum
WCYRPGEPCWVPKR

SEQ ID NO: 3234 - protein, 14 aa, Trichoderma harzianum
WCYRVGMPCWIPKR

SEQ ID NO: 3235 - protein, 13 aa, Trichoderma harzianum
CFQNGGDCWKAKR

SEQ ID NO: 3236 - protein, 14 aa, Trichoderma harzianum
WCYRIGEPCWKIKR

SEQ ID NO: 3237 - protein, 14 aa, Trichoderma harzianum
WCYRIGMPCWIPKR

SEQ ID NO: 3238 - protein, 14 aa, Trichoderma harzianum
WCYRIGQPCWKAKR

SEQ ID NO: 3239 - protein, 13 aa, Trichoderma harzianum
CFQNGGDCQKAKR

SEQ ID NO: 3240 - protein, 14 aa, Trichoderma harzianum
MCNSVGQPCWKAQR

SEQ ID NO: 3241 - protein, 14 aa, Trichoderma harzianum
WCYRPGEPCWVPKR

SEQ ID NO: 3242 - protein, 14 aa, Trichoderma lentiforme
MCNSVGQPCWKAER

SEQ ID NO: 3243 - protein, 14 aa, Trichoderma lentiforme
WCYRIGMSCWVPKR

SEQ ID NO: 3244 - protein, 14 aa, Trichoderma lentiforme
WCYRLGMPCWVPKR

SEQ ID NO: 3245 - protein, 14 aa, Trichoderma lentiforme
WCYRPGEPCWVPKR

SEQ ID NO: 3246 - protein, 14 aa, Trichoderma longibrachiatum
WCYRIGEPCWKAKR

SEQ ID NO: 3247 - protein, 14 aa, Trichoderma longibrachiatum
WCYRIGEPCWKIKR

SEQ ID NO: 3248 - protein, 14 aa, Trichoderma longibrachiatum
WCYRVGQPCWKAKR

SEQ ID NO: 3249 - protein, 14 aa, Trichoderma parareesei
WCWILGGKCWKTKR

SEQ ID NO: 3250 - protein, 14 aa, Trichoderma parareesei
WCYRIGEPCWKAKR

SEQ ID NO: 3251 - protein, 14 aa, Trichoderma parareesei
WCYRIGEPCWKLKR

SEQ ID NO: 3252 - protein, 14 aa, Trichoderma reesei
WCWILGGKCWKTKR

SEQ ID NO: 3253 - protein, 14 aa, Trichoderma reesei
WCYRIGEPCWKAKR

SEQ ID NO: 3254 - protein, 14 aa, Trichoderma reesei
WCYRIGEPCWKLKR

SEQ ID NO: 3255 - protein, 14 aa, Trichoderma reesei
WCWILGGKCWKTKR

SEQ ID NO: 3256 - protein, 14 aa, Trichoderma reesei
WCYRIGEPCWKAKR

SEQ ID NO: 3257 - protein, 14 aa, Trichoderma reesei
WCYRIGEPCWKLKR

SEQ ID NO: 3258 - protein, 13 aa, Trichoderma virens
CNQIGQPCWKVKR

SEQ ID NO: 3259 - protein, 14 aa, Trichoderma virens
WCYQTGQPCWKAKR

SEQ ID NO: 3260 - protein, 15 aa, Trichoderma virens
WCYRVGMTCGWKKKR

SEQ ID NO: 3261 - protein, 15 aa, Trichoderma virens
WCYRVGMTCGWKNKR

SEQ ID NO: 3262 - protein, 12 aa, Ustilaginoidea virens
WCDRPGEPCWKR

SEQ ID NO: 3263 - protein, 14 aa, Ustilaginoidea virens
WCDRPGEPCWKVKR

SEQ ID NO: 3264 - protein, 14 aa, Ustilaginoidea virens
WCDRPGQPCWKVKR

SEQ ID NO: 3265 - protein, 14 aa, Ustilaginoidea virens
WCWRPGEPCWKVKR

SEQ ID NO: 3266 - protein, 14 aa, Ustilaginoidea virens
WCWRPGQPCWKAKR

SEQ ID NO: 3267 - protein, 12 aa, Ustilaginoidea virens
WCDRPGEPCWKR

SEQ ID NO: 3268 - protein, 14 aa, Ustilaginoidea virens
WCDRPGEPCWKVKR

SEQ ID NO: 3269 - protein, 14 aa, Ustilaginoidea virens
WCDRPGQPCWKVKR

SEQ ID NO: 3270 - protein, 14 aa, Ustilaginoidea virens
WCWRPGEPCWKVKR

SEQ ID NO: 3271 - protein, 14 aa, Ustilaginoidea virens
WCWRPGQPCWKAKR

SEQ ID NO: 3272 - protein, 14 aa, Valsa malicola
SCEQPGEACNKARR

SEQ ID NO: 3273 - protein, 12 aa, Valsa malicola
WCLLKGQGCWKR

SEQ ID NO: 3274 - protein, 14 aa, Valsa malicola
WCLMKGQGCWKVKR

SEQ ID NO: 3275 - protein, 14 aa, Valsa mali
SCEQPGEACYKARR

SEQ ID NO: 3276 - protein, 12 aa, Valsa mali
WCLFKGEGCWKR

SEQ ID NO: 3277 - protein, 14 aa, Valsa mali
WCLFKGEGCWKVKR

SEQ ID NO: 3278 - protein, 13 aa, Valsa mali
CEQPGEACYKARR

SEQ ID NO: 3279 - protein, 12 aa, Valsa mali
WCLFKGEGCWKR

SEQ ID NO: 3280 - protein, 14 aa, Valsa mali
WCLFKGEGCWKVKR

SEQ ID NO: 3281 - protein, 17 aa, Valsa sordida
FCPFGGEAGSTCYASKR

SEQ ID NO: 3282 - protein, 12 aa, Valsa sordida
WCLLKGQGCWKR

SEQ ID NO: 3283 - protein, 14 aa, Valsa sordida
WCLLKGQGCWKVKR

SEQ ID NO: 3284 - protein, 13 aa, Venustampulla echinocandica
CTHVGQGCWKDKR

SEQ ID NO: 3285 - protein, 12 aa, Venustampulla echinocandica
CTHVGQGCWKEK

SEQ ID NO: 3286 - protein, 11 aa, Venustampulla echinocandica
CTHVGQGCWKR

SEQ ID NO: 3287 - protein, 13 aa, Verticillium alfalfae
CPRPGQGCWKAKR

SEQ ID NO: 3288 - protein, 13 aa, Verticillium alfalfae
CPRPGQGCWKNKR

SEQ ID NO: 3289 - protein, 13 aa, Verticillium dahliae
CPRPGQGCWKAKR

SEQ ID NO: 3290 - protein, 13 aa, Verticillium dahliae
CPRPGQGCWKNKR

SEQ ID NO: 3291 - protein, 13 aa, Verticillium dahliae
CPRPGQGCWKAKR

SEQ ID NO: 3292 - protein, 13 aa, Verticillium dahliae
CPRPGQGCWKNKR

SEQ ID NO: 3293 - protein, 13 aa, Verticillium dahliae
CPRPGQGCWKAKR

SEQ ID NO: 3294 - protein, 13 aa, Verticillium dahliae
CPRPGQGCWKNKR

SEQ ID NO: 3295 - protein, 13 aa, Verticillium dahliae
CPRPGQGCWKAKR

SEQ ID NO: 3296 - protein, 13 aa, Verticillium dahliae
CPRPGQGCWKNKR

SEQ ID NO: 3297 - protein, 13 aa, Verticillium dahliae
CPRPGQGCWKAKR

SEQ ID NO: 3298 - protein, 13 aa, Verticillium dahliae
CPRPGQGCWKNKR

SEQ ID NO: 3299 - protein, 13 aa, Verticillium dahliae
CPRPGQGCWKAKR

SEQ ID NO: 3300 - protein, 13 aa, Verticillium dahliae
CPRPGQGCWKNKR

SEQ ID NO: 3301 - protein, 13 aa, Verticillium dahliae
CPRPGQGCWKAKR

SEQ ID NO: 3302 - protein, 13 aa, Verticillium dahliae
CPRPGQGCWKNKR

SEQ ID NO: 3303 - protein, 13 aa, Verticillium dahliae
CPRPGQGCWKAKR

SEQ ID NO: 3304 - protein, 13 aa, Verticillium dahliae
CPRPGQGCWKNKR

SEQ ID NO: 3305 - protein, 13 aa, Verticillium dahliae
CPRPGQGCWKAKR

SEQ ID NO: 3306 - protein, 13 aa, Verticillium dahliae
CPRPGQGCWKNKR

SEQ ID NO: 3307 - protein, 13 aa, Verticillium dahliae
CPRPGQGCWKAKR

SEQ ID NO: 3308 - protein, 13 aa, Verticillium dahliae
CPRPGQGCWKNKR

SEQ ID NO: 3309 - protein, 13 aa, Verticillium longisporum
CPRPGQGCWKNKR

SEQ ID NO: 3310 - protein, 13 aa, Verticillium longisporum
CPRPGQGCWKNKR

SEQ ID NO: 3311 - protein, 13 aa, Verticillium longisporum
CSRPGQGCWKAKR

SEQ ID NO: 3312 - protein, 13 aa, Verticillium longisporum
CSRPGQGCWKNKR

SEQ ID NO: 3313 - protein, 13 aa, Verticillium longisporum
CPRPGQGCWKNKR

SEQ ID NO: 3314 - protein, 13 aa, Verticillium longisporum
CSRPGQGCWKAKR

SEQ ID NO: 3315 - protein, 13 aa, Verticillium longisporum
CSRPGQGCWKNKR

SEQ ID NO: 3316 - protein, 13 aa, Verticillium nonalfalfae
CPRPGQGCWKAKR

SEQ ID NO: 3317 - protein, 13 aa, Verticillium nonalfalfae
CPRPGQGCWKNKR

SEQ ID NO: 3318 - protein, 12 aa, Westerdykella ornata
CWFRGQPCKAKR

SEQ ID NO: 3319 - protein, 13 aa, Westerdykella ornata
CWFRGQPCKKVKR

SEQ ID NO: 3320 - protein, 13 aa, Westerdykella ornata
CWFRGQPCRKLKR

SEQ ID NO: 3321 - protein, 13 aa, Westerdykella ornata
CWFRGQPCSKAKR

SEQ ID NO: 3322 - protein, 13 aa, Westerdykella ornata
CWFRGQPCSKVKR

SEQ ID NO: 3323 - protein, 14 aa, Xylona heveae
FCHLPGQGCSKAKR

SEQ ID NO: 3324 - protein, 14 aa, Xylona heveae
FCHLPGQGCSKLKR

SEQ ID NO: 3325 - protein, 14 aa, Xylona heveae
FCHLPGQGCSKVKR

SEQ ID NO: 3326 - protein, 13 aa, Zasmidium cellare
CSEPGGDCDVAKR

SEQ ID NO: 3327 - protein, 14 aa, Zasmidium cellare
FCGLPGEACSRVKR

SEQ ID NO: 3328 - protein, 14 aa, Zasmidium cellare
FCGVPGEACEVTKR

SEQ ID NO: 3329 - protein, 14 aa, Zasmidium cellare
WKCGVPGQACNKKR

SEQ ID NO: 3330 - protein, 14 aa, Zasmidium cellare
WKCGVPGQACNRKR

SEQ ID NO: 3331 - protein, 14 aa, Zasmidium cellare
WKCGVRGQACNKKR

SEQ ID NO: 3332 - protein, 14 aa, Zymoseptoria brevis
WCGAIGAPCAKAKR

SEQ ID NO: 3333 - protein, 14 aa, Zymoseptoria brevis
WCGAIGAPCAKDKR

SEQ ID NO: 3334 - protein, 13 aa, Zymoseptoria brevis
WCGAIGAPCAKRD

SEQ ID NO: 3335 - protein, 14 aa, Zymoseptoria brevis
WCGAIGAPCAKVKR

SEQ ID NO: 3336 - protein, 14 aa, Zymoseptoria brevis
WCGAIGAPCARVKR

SEQ ID NO: 3337 - protein, 14 aa, Zymoseptoria brevis
WCGALGAPCAKVKR

SEQ ID NO: 3338 - protein, 14 aa, Zymoseptoria tritici
WCGAIGAPCAKAKR

SEQ ID NO: 3339 - protein, 14 aa, Zymoseptoria tritici
WCGAIGAPCAKDKR

SEQ ID NO: 3340 - protein, 12 aa, Zymoseptoria tritici
WCGAIGAPCAKR

SEQ ID NO: 3341 - protein, 14 aa, Zymoseptoria tritici
WCGAIGAPCAKVKR

SEQ ID NO: 3342 - protein, 14 aa, Zymoseptoria tritici
WCGAIGAPCARVKR

SEQ ID NO: 3343 - protein, 14 aa, Zymoseptoria tritici
WCGALGAPCAKVKR

SEQ ID NO: 3344 - protein, 14 aa, Zymoseptoria tritici
WCGAIGAPCAKAKR

SEQ ID NO: 3345 - protein, 14 aa, Zymoseptoria tritici
WCGAIGAPCAKDKR

SEQ ID NO: 3346 - protein, 12 aa, Zymoseptoria tritici
WCGAIGAPCAKR

SEQ ID NO: 3347 - protein, 14 aa, Zymoseptoria tritici
WCGAIGAPCAKVKR

SEQ ID NO: 3348 - protein, 14 aa, Zymoseptoria tritici
WCGAIGAPCARVKR

SEQ ID NO: 3349 - protein, 14 aa, Zymoseptoria tritici
WCGALGAPCAKVKR

SEQ ID NO: 3350 - protein, 14 aa, Zymoseptoria tritici
WCGAIGAPCAKAKR

SEQ ID NO: 3351 - protein, 14 aa, Zymoseptoria tritici
WCGAIGAPCAKDKR

SEQ ID NO: 3352 - protein, 12 aa, Zymoseptoria tritici
WCGAIGAPCAKR

SEQ ID NO: 3353 - protein, 14 aa, Zymoseptoria tritici
WCGAIGAPCAKVKR

SEQ ID NO: 3354 - protein, 14 aa, Zymoseptoria tritici
WCGAIGAPCARVKR

SEQ ID NO: 3355 - protein, 14 aa, Zymoseptoria tritici
WCGALGAPCAKVKR

SEQ ID NO: 3356 - protein, 14 aa, Zymoseptoria tritici
WCGAIGAPCAKAKR

SEQ ID NO: 3357 - protein, 14 aa, Zymoseptoria tritici
WCGAIGAPCAKDKR

SEQ ID NO: 3358 - protein, 12 aa, Zymoseptoria tritici
WCGAIGAPCAKR

SEQ ID NO: 3359 - protein, 14 aa, Zymoseptoria tritici
WCGAIGAPCAKVKR

SEQ ID NO: 3360 - protein, 14 aa, Zymoseptoria tritici
WCGAIGAPCARVKR

SEQ ID NO: 3361 - protein, 14 aa, Zymoseptoria tritici
WCGALGAPCAKVKR

SEQ ID NO: 3362 - DNA, 39 bp, Aaosphaeria arxii
  source 1..39: mol_type = other DNA
tgcggcatgcccggccagccctgcgaccgtctcaagcgc

SEQ ID NO: 3363 - DNA, 39 bp, Aaosphaeria arxii
  source 1..39: mol_type = other DNA
tgccttttcgtaggccaatcatgctccgtcgccaaacgc

SEQ ID NO: 3364 - DNA, 39 bp, Aaosphaeria arxii
  source 1..39: mol_type = other DNA
tgcagatggcctggtcagccatgctccaaggacaagcgt

SEQ ID NO: 3365 - DNA, 39 bp, Aaosphaeria arxii
  source 1..39: mol_type = other DNA
tgccgctggccaggacagccttgctccaaggagaagcgt

SEQ ID NO: 3366 - DNA, 39 bp, Aaosphaeria arxii
  source 1..39: mol_type = other DNA
tgccgctggccaggacagccttgctccaagaagagggag

SEQ ID NO: 3367 - DNA, 39 bp, Aaosphaeria arxii
  source 1..39: mol_type = other DNA
tgcacctttggcgactccgtctgcagcaagatcaagcgc

SEQ ID NO: 3368 - DNA, 39 bp, Acremonium chrysogenum
  source 1..39: mol_type = other DNA
tgccaccgtcccggcggggagtgcttcaaggcgaagagg

SEQ ID NO: 3369 - DNA, 42 bp, Acremonium chrysogenum
  source 1..42: mol_type = other DNA
tggtgctacatagaaacttacgattgtcctcgtgcgaagcgc

SEQ ID NO: 3370 - DNA, 42 bp, Akanthomyces lecanii
  source 1..42: mol_type = other DNA
tggtgcatgagacctgcccagccctgctggaagctcaagcgc

SEQ ID NO: 3371 - DNA, 42 bp, Akanthomyces lecanii
  source 1..42: mol_type = other DNA
tggtgcatgaggccggcgcagccatgctggaagaccaggcgc

SEQ ID NO: 3372 - DNA, 42 bp, Amniculicola lignicola
  source 1..42: mol_type = other DNA
gcgcttggccttgccacagggttggcccgggaagcggcacca

SEQ ID NO: 3373 - DNA, 42 bp, Amniculicola lignicola
  source 1..42: mol_type = other DNA
acgcttgtccttgccacagggttggccagggaagcggcacca

SEQ ID NO: 3374 - DNA, 42 bp, Amniculicola lignicola
  source 1..42: mol_type = other DNA
gcgcttgttcttgccgcagggctggcccgggaagcggcacca

SEQ ID NO: 3375 - DNA, 39 bp, Amorphotheca resinae
  source 1..39: mol_type = other DNA
tgcggaaaggtcggacaaccctgcggaaaggccaagcgt

SEQ ID NO: 3376 - DNA, 39 bp, Amorphotheca resinae
  source 1..39: mol_type = other DNA
tgcgggaaggtcggacaaccctgcggaaagataaagcgt

SEQ ID NO: 3377 - DNA, 39 bp, Amorphotheca resinae
  source 1..39: mol_type = other DNA
tgcaaccttgtcggaggtgcatgctacgaagccaagcgc

SEQ ID NO: 3378 - DNA, 39 bp, Amorphotheca resinae; identical to SEQ ID NO: 3377
  source 1..39: mol_type = other DNA

SEQ ID NO: 3379 - DNA, 63 bp, Aplosporella prunicola
  source 1..63: mol_type = other DNA
tggaaggccccctggccgcgcttctgcttccgccccggccagccctgcaccaaggccaagcgg

SEQ ID NO: 3380 - DNA, 63 bp, Aplosporella prunicola
  source 1..63: mol_type = other DNA
tggaaggccccctggccccgcttctgcttccgccccggccagccctgcaccaaagtcaagcgg

SEQ ID NO: 3381 - DNA, 51 bp, Aplosporella prunicola
  source 1..51: mol_type = other DNA
tggccccgcttctgcttccgtcctggccagccgtgtacgaaggctaagagg

SEQ ID NO: 3382 - DNA, 42 bp, Aspergillus aculeatinus
  source 1..42: mol_type = other DNA
tggtgctatctccctggccagccttgtgccatgatgaagcgt

SEQ ID NO: 3383 - DNA, 42 bp, Aspergillus aculeatinus
  source 1..42: mol_type = other DNA
tggtgctacttgcctggccaaccatgccagaagatcaagcga

SEQ ID NO: 3384 - DNA, 42 bp, Aspergillus aculeatinus
  source 1..42: mol_type = other DNA
tggtgctatctccctggccagccttgcgccatgataaagcgt

SEQ ID NO: 3385 - DNA, 42 bp, Aspergillus aculeatinus
  source 1..42: mol_type = other DNA
tggtgctacttgccgggccaaccatgtcagaagatcaagcga

SEQ ID NO: 3386 - DNA, 42 bp, Aspergillus alliaceus
  source 1..42: mol_type = other DNA
acgcttaagcatgtagcagccctgagcgagccccgtgcaccg

SEQ ID NO: 3387 - DNA, 42 bp, Aspergillus alliaceus
  source 1..42: mol_type = other DNA
ccgcttaaacttgaggcatccttgaccaggcaaatgacacca

SEQ ID NO: 3388 - DNA, 42 bp, Aspergillus alliaceus; identical to SEQ ID NO: 3386
  source 1..42: mol_type = other DNA

SEQ ID NO: 3389 - DNA, 42 bp, Aspergillus alliaceus; identical to SEQ ID NO: 3387
  source 1..42: mol_type = other DNA

SEQ ID NO: 3390 - DNA, 42 bp, Aspergillus arachidicola
  source 1..42: mol_type = other DNA
tggtgcgccctacctgctcagggctgctacatgctgaaacgt

SEQ ID NO: 3391 - DNA, 42 bp, Aspergillus arachidicola
  source 1..42: mol_type = other DNA
tggtgtgccctgcctggtcagggatgtctcaaagctaagcgg

SEQ ID NO: 3392 - DNA, 42 bp, Aspergillus avenaceus
  source 1..42: mol_type = other DNA
cctctttactttatagcatccttgaccgggcccatggcacca

SEQ ID NO: 3393 - DNA, 42 bp, Aspergillus avenaceus
  source 1..42: mol_type = other DNA
acgcttgaacatgtagcaaccctgaccggggccatgacacca

SEQ ID NO: 3394 - DNA, 42 bp, Aspergillus awamori
  source 1..42: mol_type = other DNA
tggtgtgtcctgcctggccaaccttgcaacaagatcaagcgg

SEQ ID NO: 3395 - DNA, 42 bp, Aspergillus awamori
  source 1..42: mol_type = other DNA
tggtgtgtcctccctggccagccatgcaacatgatcaagcgt

SEQ ID NO: 3396 - DNA, 42 bp, Aspergillus bertholletiae
  source 1..42: mol_type = other DNA
tggtgtgccctgcctggtcaggggtgtcttaaagctaagcgt

SEQ ID NO: 3397 - DNA, 42 bp, Aspergillus bertholletiae
  source 1..42: mol_type = other DNA
tggtgtgcattgcccggccagggctgctacatgctgaaacgt

SEQ ID NO: 3398 - DNA, 42 bp, Aspergillus bombycis
  source 1..42: mol_type = other DNA
acgtttcagcatgtagcagccctgagcaggcagtgcgcacca

SEQ ID NO: 3399 - DNA, 42 bp, Aspergillus bombycis
  source 1..42: mol_type = other DNA
ccgcttagccttgagacatccctgaccaggaagggcacacca

SEQ ID NO: 3400 - DNA, 42 bp, Aspergillus brasiliensis
  source 1..42: mol_type = other DNA
tggtgtgtccttcctggtcagccttgcaacaagattaagcgg

SEQ ID NO: 3401 - DNA, 42 bp, Aspergillus brasiliensis; identical to SEQ ID NO: 3395
  source 1..42: mol_type = other DNA

SEQ ID NO: 3402 - DNA, 42 bp, Aspergillus brunneoviolaceus
  source 1..42: mol_type = other DNA
acgcttcatcatggcacaaggctggccagggagatagcacca

SEQ ID NO: 3403 - DNA, 42 bp, Aspergillus brunneoviolaceus
  source 1..42: mol_type = other DNA
tcgcttgatcttctggcatggttggccaggcaagtagcacca

SEQ ID NO: 3404 - DNA, 42 bp, Aspergillus campestris
  source 1..42: mol_type = other DNA
tcgcttagccttctggcacccttgaccggggaaatggcacca

SEQ ID NO: 3405 - DNA, 42 bp, Aspergillus campestris
  source 1..42: mol_type = other DNA
acgcttgagcatgtagcagccttggcccgggaagtggcacca

SEQ ID NO: 3406 - DNA, 42 bp, Aspergillus candidus
  source 1..42: mol_type = other DNA
tcgcttggccttctggcacccttgaccagggaaatggcacca

SEQ ID NO: 3407 - DNA, 42 bp, Aspergillus candidus
  source 1..42: mol_type = other DNA
acgcttgagcatgtagcagccttggccggggaagtgacacca

SEQ ID NO: 3408 - DNA, 42 bp, Aspergillus carbonarius
  source 1..42: mol_type = other DNA
ccgcttgatcttgttgcatggctggccgggcagattgcacca

SEQ ID NO: 3409 - DNA, 42 bp, Aspergillus carbonarius
  source 1..42: mol_type = other DNA
gcgcttgatcatgttgcatggctggccgggcagattgcacca

SEQ ID NO: 3410 - DNA, 42 bp, Aspergillus carbonarius; identical to SEQ ID NO: 3408
  source 1..42: mol_type = other DNA

SEQ ID NO: 3411 - DNA, 42 bp, Aspergillus carbonarius; identical to SEQ ID NO: 3409
  source 1..42: mol_type = other DNA

SEQ ID NO: 3412 - DNA, 42 bp, Aspergillus clavatus
  source 1..42: mol_type = other DNA
acgcttgaccttgtggcaaccctggccgggcaattcgcacca

SEQ ID NO: 3413 - DNA, 42 bp, Aspergillus clavatus
  source 1..42: mol_type = other DNA
gcgcttgatcatgtagcagccctggccagggagttcacacca

SEQ ID NO: 3414 - DNA, 42 bp, Aspergillus coremiiformis
  source 1..42: mol_type = other DNA
tggtgcaatgggcccggtcagggctgctacatgtttaagcgt

SEQ ID NO: 3415 - DNA, 42 bp, Aspergillus coremiiformis
  source 1..42: mol_type = other DNA
tggtgtcgcttgcctggccaaggatgccttaaagttaagcgg

SEQ ID NO: 3416 - DNA, 42 bp, Aspergillus costaricaensis
  source 1..42: mol_type = other DNA
acgcttgatcatgttgcatggctggccagggaggtgacacca

SEQ ID NO: 3417 - DNA, 42 bp, Aspergillus costaricaensis
  source 1..42: mol_type = other DNA
ccgcttgatcttgttgcaaggctgaccaggcaggacacacca

SEQ ID NO: 3418 - DNA, 42 bp, Aspergillus ellipticus
  source 1..42: mol_type = other DNA
ccgtttgattttgttgcatggctgaccgggcaagacacacca

SEQ ID NO: 3419 - DNA, 42 bp, Aspergillus ellipticus
  source 1..42: mol_type = other DNA
gcgtttcatcttattacatggctgaccgggaaggacacacca

SEQ ID NO: 3420 - DNA, 42 bp, Aspergillus eucalypticola; identical to SEQ ID NO: 3417
  source 1..42: mol_type = other DNA

SEQ ID NO: 3421 - DNA, 42 bp, Aspergillus eucalypticola
  source 1..42: mol_type = other DNA
acgcttgatcatgttgcatggctggccagggaggtaacacca

SEQ ID NO: 3422 - DNA, 42 bp, Aspergillus fijiensis
  source 1..42: mol_type = other DNA
tggtgctatctccctggtcagccttgtgccatgatgaagcgt

SEQ ID NO: 3423 - DNA, 42 bp, Aspergillus fijiensis; identical to SEQ ID NO: 3383
  source 1..42: mol_type = other DNA

SEQ ID NO: 3424 - DNA, 42 bp, Aspergillus fischeri
  source 1..42: mol_type = other DNA
tctcttcgccttggcgcaaccctgaccgggaagatggcacca

SEQ ID NO: 3425 - DNA, 42 bp, Aspergillus fischeri
  source 1..42: mol_type = other DNA
gcgcttaagcatgtagcaaccctgaccaggaagatggcacca

SEQ ID NO: 3426 - DNA, 42 bp, Aspergillus flavus
  source 1..42: mol_type = other DNA
tggtgtgccttgcctggtcagggatgcctcaaagctaagcgg

SEQ ID NO: 3427 - DNA, 42 bp, Aspergillus flavus
  source 1..42: mol_type = other DNA
tggtgctccctgcctgctcagggctgctacatgctgaaacgt

SEQ ID NO: 3428 - DNA, 42 bp, Aspergillus flavus
  source 1..42: mol_type = other DNA
ccgcttagctttgaggcatccctgaccaggcaaggcacacca

SEQ ID NO: 3429 - DNA, 42 bp, Aspergillus flavus
  source 1..42: mol_type = other DNA
acgtttcagcatgtagcagccctgagcaggcagggagcacca

SEQ ID NO: 3430 - DNA, 42 bp, Aspergillus flavus; identical to SEQ ID NO: 3426
  source 1..42: mol_type = other DNA

SEQ ID NO: 3431 - DNA, 42 bp, Aspergillus flavus; identical to SEQ ID NO: 3427
  source 1..42: mol_type = other DNA

SEQ ID NO: 3432 - DNA, 42 bp, Aspergillus flavus; identical to SEQ ID NO: 3428
  source 1..42: mol_type = other DNA

SEQ ID NO: 3433 - DNA, 42 bp, Aspergillus flavus; identical to SEQ ID NO: 3429
  source 1..42: mol_type = other DNA

SEQ ID NO: 3434 - DNA, 42 bp, Aspergillus flavus; identical to SEQ ID NO: 3428
  source 1..42: mol_type = other DNA

SEQ ID NO: 3435 - DNA, 42 bp, Aspergillus flavus; identical to SEQ ID NO: 3429
  source 1..42: mol_type = other DNA

SEQ ID NO: 3436 - DNA, 42 bp, Aspergillus flavus; identical to SEQ ID NO: 3426
  source 1..42: mol_type = other DNA

SEQ ID NO: 3437 - DNA, 42 bp, Aspergillus flavus; identical to SEQ ID NO: 3427
  source 1..42: mol_type = other DNA

SEQ ID NO: 3438 - DNA, 30 bp, Aspergillus fumigatiaffinis
  source 1..30: mol_type = other DNA
cgcgcatccaacgccagtagccttgcacca

SEQ ID NO: 3439 - DNA, 33 bp, Aspergillus fumigatiaffinis
  source 1..33: mol_type = other DNA
aagcgcgcatccaacgccagtagccttgcacca

SEQ ID NO: 3440 - DNA, 42 bp, Aspergillus fumigatiaffinis
  source 1..42: mol_type = other DNA
tggtgccatcttcccggtcagggttgcgccaaggcgaagaga

SEQ ID NO: 3441 - DNA, 42 bp, Aspergillus fumigatiaffinis
  source 1..42: mol_type = other DNA
tggtgccatcttcctggtcagggttgctacatgcttaagcgc

SEQ ID NO: 3442 - DNA, 42 bp, Aspergillus fumigatiaffinis; identical to SEQ ID NO: 3424
  source 1..42: mol_type = other DNA

SEQ ID NO: 3443 - DNA, 42 bp, Aspergillus fumigatiaffinis; identical to SEQ ID NO: 3425
  source 1..42: mol_type = other DNA

SEQ ID NO: 3444 - DNA, 18 bp, Aspergillus fumigatiaffinis
  source 1..18: mol_type = other DNA
accgggtatcaaacacca

SEQ ID NO: 3445 - DNA, 18 bp, Aspergillus fumigatiaffinis
  source 1..18: mol_type = other DNA
accgggtatcaaacacca

SEQ ID NO: 3446 - DNA, 42 bp, Aspergillus fumigatus; identical to SEQ ID NO: 3424
  source 1..42: mol_type = other DNA

SEQ ID NO: 3447 - DNA, 42 bp, Aspergillus fumigatus; identical to SEQ ID NO: 3425
  source 1..42: mol_type = other DNA

SEQ ID NO: 3448 - DNA, 42 bp, Aspergillus fumigatus; identical to SEQ ID NO: 3424
  source 1..42: mol_type = other DNA

SEQ ID NO: 3449 - DNA, 42 bp, Aspergillus fumigatus; identical to SEQ ID NO: 3425
  source 1..42: mol_type = other DNA

SEQ ID NO: 3450 - DNA, 42 bp, Aspergillus fumigatus; identical to SEQ ID NO: 3440
  source 1..42: mol_type = other DNA

SEQ ID NO: 3451 - DNA, 42 bp, Aspergillus fumigatus; identical to SEQ ID NO: 3441
  source 1..42: mol_type = other DNA

SEQ ID NO: 3452 - DNA, 42 bp, Aspergillus fumigatus; identical to SEQ ID NO: 3424
  source 1..42: mol_type = other DNA

SEQ ID NO: 3453 - DNA, 42 bp, Aspergillus fumigatus; identical to SEQ ID NO: 3425
  source 1..42: mol_type = other DNA

SEQ ID NO: 3454 - DNA, 42 bp, Aspergillus fumigatus; identical to SEQ ID NO: 3440
  source 1..42: mol_type = other DNA

SEQ ID NO: 3455 - DNA, 42 bp, Aspergillus fumigatus; identical to SEQ ID NO: 3441
  source 1..42: mol_type = other DNA

SEQ ID NO: 3456 - DNA, 42 bp, Aspergillus fumigatus; identical to SEQ ID NO: 3424
  source 1..42: mol_type = other DNA

SEQ ID NO: 3457 - DNA, 42 bp, Aspergillus fumigatus; identical to SEQ ID NO: 3425
  source 1..42: mol_type = other DNA

SEQ ID NO: 3458 - DNA, 42 bp, Aspergillus fumigatus; identical to SEQ ID NO: 3424
  source 1..42: mol_type = other DNA

SEQ ID NO: 3459 - DNA, 42 bp, Aspergillus fumigatus; identical to SEQ ID NO: 3425
  source 1..42: mol_type = other DNA

SEQ ID NO: 3460 - DNA, 42 bp, Aspergillus fumigatus; identical to SEQ ID NO: 3424
  source 1..42: mol_type = other DNA

SEQ ID NO: 3461 - DNA, 42 bp, Aspergillus fumigatus; identical to SEQ ID NO: 3425
  source 1..42: mol_type = other DNA

SEQ ID NO: 3462 - DNA, 42 bp, Aspergillus fumigatus; identical to SEQ ID NO: 3424
  source 1..42: mol_type = other DNA

SEQ ID NO: 3463 - DNA, 42 bp, Aspergillus fumigatus; identical to SEQ ID NO: 3425
  source 1..42: mol_type = other DNA

SEQ ID NO: 3464 - DNA, 42 bp, Aspergillus fumigatus; identical to SEQ ID NO: 3424
  source 1..42: mol_type = other DNA

SEQ ID NO: 3465 - DNA, 42 bp, Aspergillus fumigatus; identical to SEQ ID NO: 3425
  source 1..42: mol_type = other DNA

SEQ ID NO: 3466 - DNA, 42 bp, Aspergillus fumigatus; identical to SEQ ID NO: 3424
  source 1..42: mol_type = other DNA

SEQ ID NO: 3467 - DNA, 42 bp, Aspergillus fumigatus; identical to SEQ ID NO: 3425
  source 1..42: mol_type = other DNA

SEQ ID NO: 3468 - DNA, 42 bp, Aspergillus heteromorphus
  source 1..42: mol_type = other DNA
gcgcttcatcttatggcagggctggccggggaggacacacca

SEQ ID NO: 3469 - DNA, 42 bp, Aspergillus heteromorphus
  source 1..42: mol_type = other DNA
gcgcttgattttgttgcatggttgacctggcaaaacacacca

SEQ ID NO: 3470 - DNA, 42 bp, Aspergillus homomorphus
  source 1..42: mol_type = other DNA
tggtgctacctccccggccagccctgcgccatgatgaagcgt

SEQ ID NO: 3471 - DNA, 42 bp, Aspergillus homomorphus
  source 1..42: mol_type = other DNA
tggtgttacttgcctggccagccctgccagaagatcaaacga

SEQ ID NO: 3472 - DNA, 42 bp, Aspergillus ibericus
  source 1..42: mol_type = other DNA
ccgcttgattttggtgcatggctggccgggaagatagcacca

SEQ ID NO: 3473 - DNA, 42 bp, Aspergillus ibericus
  source 1..42: mol_type = other DNA
gcgtttgatcatggtgcacggctggccagggaggtaacacca

SEQ ID NO: 3474 - DNA, 42 bp, Aspergillus indologenus; identical to SEQ ID NO: 3402
  source 1..42: mol_type = other DNA

SEQ ID NO: 3475 - DNA, 42 bp, Aspergillus indologenus
  source 1..42: mol_type = other DNA
tcgcttgatcttctggcatggttggccaggcaggtagcacca

SEQ ID NO: 3476 - DNA, 42 bp, Aspergillus japonicus; identical to SEQ ID NO: 3382
  source 1..42: mol_type = other DNA

SEQ ID NO: 3477 - DNA, 42 bp, Aspergillus japonicus
  source 1..42: mol_type = other DNA
tggtgctacctgcctggccaaccatgccagaagatcaagcga

SEQ ID NO: 3478 - DNA, 42 bp, Aspergillus lentulus; identical to SEQ ID NO: 3440
  source 1..42: mol_type = other DNA

SEQ ID NO: 3479 - DNA, 42 bp, Aspergillus lentulus; identical to SEQ ID NO: 3441
  source 1..42: mol_type = other DNA

SEQ ID NO: 3480 - DNA, 42 bp, Aspergillus lentulus; identical to SEQ ID NO: 3440
  source 1..42: mol_type = other DNA

SEQ ID NO: 3481 - DNA, 42 bp, Aspergillus lentulus; identical to SEQ ID NO: 3441
  source 1..42: mol_type = other DNA

SEQ ID NO: 3482 - DNA, 42 bp, Aspergillus lentulus; identical to SEQ ID NO: 3424
  source 1..42: mol_type = other DNA

SEQ ID NO: 3483 - DNA, 42 bp, Aspergillus lentulus; identical to SEQ ID NO: 3425
  source 1..42: mol_type = other DNA

SEQ ID NO: 3484 - DNA, 42 bp, Aspergillus lentulus; identical to SEQ ID NO: 3424
  source 1..42: mol_type = other DNA

SEQ ID NO: 3485 - DNA, 42 bp, Aspergillus lentulus; identical to SEQ ID NO: 3425
  source 1..42: mol_type = other DNA

SEQ ID NO: 3486 - DNA, 42 bp, Aspergillus lentulus; identical to SEQ ID NO: 3440
  source 1..42: mol_type = other DNA

SEQ ID NO: 3487 - DNA, 42 bp, Aspergillus lentulus; identical to SEQ ID NO: 3441
  source 1..42: mol_type = other DNA

SEQ ID NO: 3488 - DNA, 42 bp, Aspergillus lentulus; identical to SEQ ID NO: 3424
  source 1..42: mol_type = other DNA

SEQ ID NO: 3489 - DNA, 42 bp, Aspergillus lentulus; identical to SEQ ID NO: 3425
  source 1..42: mol_type = other DNA

SEQ ID NO: 3490 - DNA, 42 bp, Aspergillus lentulus; identical to SEQ ID NO: 3424
  source 1..42: mol_type = other DNA

SEQ ID NO: 3491 - DNA, 42 bp, Aspergillus lentulus; identical to SEQ ID NO: 3425
  source 1..42: mol_type = other DNA

SEQ ID NO: 3492 - DNA, 42 bp, Aspergillus lentulus; identical to SEQ ID NO: 3440
  source 1..42: mol_type = other DNA

SEQ ID NO: 3493 - DNA, 42 bp, Aspergillus lentulus; identical to SEQ ID NO: 3441
  source 1..42: mol_type = other DNA

SEQ ID NO: 3494 - DNA, 42 bp, Aspergillus lentulus; identical to SEQ ID NO: 3425
  source 1..42: mol_type = other DNA

SEQ ID NO: 3495 - DNA, 42 bp, Aspergillus lentulus; identical to SEQ ID NO: 3425
  source 1..42: mol_type = other DNA

SEQ ID NO: 3496 - DNA, 42 bp, Aspergillus lentulus; identical to SEQ ID NO: 3440
  source 1..42: mol_type = other DNA

SEQ ID NO: 3497 - DNA, 42 bp, Aspergillus lentulus; identical to SEQ ID NO: 3441
  source 1..42: mol_type = other DNA

SEQ ID NO: 3498 - DNA, 42 bp, Aspergillus lentulus; identical to SEQ ID NO: 3425
  source 1..42: mol_type = other DNA

SEQ ID NO: 3499 - DNA, 42 bp, Aspergillus lentulus; identical to SEQ ID NO: 3425
  source 1..42: mol_type = other DNA

SEQ ID NO: 3500 - DNA, 42 bp, Aspergillus lentulus; identical to SEQ ID NO: 3424
  source 1..42: mol_type = other DNA

SEQ ID NO: 3501 - DNA, 42 bp, Aspergillus lentulus; identical to SEQ ID NO: 3425
  source 1..42: mol_type = other DNA

SEQ ID NO: 3502 - DNA, 42 bp, Aspergillus luchuensis
  source 1..42: mol_type = other DNA
tggtgtcatctccctggccagccatgcaacatgatcaagcgt

SEQ ID NO: 3503 - DNA, 42 bp, Aspergillus luchuensis
  source 1..42: mol_type = other DNA
tggtgtgtcctgcctggtcagccctgcaacaagatcaagcgg

SEQ ID NO: 3504 - DNA, 42 bp, Aspergillus luchuensis
  source 1..42: mol_type = other DNA
tggtgtcacctccctggccagccatgcaacatgatcaagcgt

SEQ ID NO: 3505 - DNA, 42 bp, Aspergillus luchuensis; identical to SEQ ID NO: 3503
  source 1..42: mol_type = other DNA

SEQ ID NO: 3506 - DNA, 42 bp, Aspergillus luchuensis; identical to SEQ ID NO: 3502
  source 1..42: mol_type = other DNA

SEQ ID NO: 3507 - DNA, 42 bp, Aspergillus luchuensis; identical to SEQ ID NO: 3503
  source 1..42: mol_type = other DNA

SEQ ID NO: 3508 - DNA, 42 bp, Aspergillus mulundensis
  source 1..42: mol_type = other DNA
acgcttggccttatggcagacctgtccgggccacctgcacca

SEQ ID NO: 3509 - DNA, 42 bp, Aspergillus mulundensis
  source 1..42: mol_type = other DNA
acgcttggacttatggcagacctgtccgggccacctgcacca

SEQ ID NO: 3510 - DNA, 42 bp, Aspergillus neoniger; identical to SEQ ID NO: 3417
  source 1..42: mol_type = other DNA

SEQ ID NO: 3511 - DNA, 42 bp, Aspergillus neoniger; identical to SEQ ID NO: 3421
  source 1..42: mol_type = other DNA

SEQ ID NO: 3512 - DNA, 42 bp, Aspergillus niger
  source 1..42: mol_type = other DNA
tggtgtgtcctgcctggccagccttgcaacaagatcaagcgg

SEQ ID NO: 3513 - DNA, 42 bp, Aspergillus niger; identical to SEQ ID NO: 3395
  source 1..42: mol_type = other DNA

SEQ ID NO: 3514 - DNA, 42 bp, Aspergillus niger; identical to SEQ ID NO: 3504
  source 1..42: mol_type = other DNA

SEQ ID NO: 3515 - DNA, 42 bp, Aspergillus niger
  source 1..42: mol_type = other DNA
tggtgtgtcctgcctggtcagccttgcaacaagatcaagcgg

SEQ ID NO: 3516 - DNA, 42 bp, Aspergillus niger
  source 1..42: mol_type = other DNA
ccgcttgatcttgttgcaaggctggccaggcaggacacacca

SEQ ID NO: 3517 - DNA, 42 bp, Aspergillus niger
  source 1..42: mol_type = other DNA
acgcttgatcatgttgcatgactggccagggaggacacacca

SEQ ID NO: 3518 - DNA, 42 bp, Aspergillus niger; identical to SEQ ID NO: 3512
  source 1..42: mol_type = other DNA

SEQ ID NO: 3519 - DNA, 42 bp, Aspergillus niger
  source 1..42: mol_type = other DNA
tggtgtgtcctccctggccagtcatgcaacatgatcaagcgt

SEQ ID NO: 3520 - DNA, 42 bp, Aspergillus niger; identical to SEQ ID NO: 3512
  source 1..42: mol_type = other DNA

SEQ ID NO: 3521 - DNA, 42 bp, Aspergillus niger; identical to SEQ ID NO: 3519
  source 1..42: mol_type = other DNA

SEQ ID NO: 3522 - DNA, 42 bp, Aspergillus niger; identical to SEQ ID NO: 3512
  source 1..42: mol_type = other DNA

SEQ ID NO: 3523 - DNA, 42 bp, Aspergillus niger; identical to SEQ ID NO: 3395
  source 1..42: mol_type = other DNA

SEQ ID NO: 3524 - DNA, 42 bp, Aspergillus niger; identical to SEQ ID NO: 3516
  source 1..42: mol_type = other DNA

SEQ ID NO: 3525 - DNA, 42 bp, Aspergillus niger
  source 1..42: mol_type = other DNA
acgcttgatcatgttgcatggctggccagggaggacacacca

SEQ ID NO: 3526 - DNA, 42 bp, Aspergillus nomiae
  source 1..42: mol_type = other DNA
ccgtttcagcatgtagcagccctgagcaggcagtgcacacca

SEQ ID NO: 3527 - DNA, 42 bp, Aspergillus nomiae
  source 1..42: mol_type = other DNA
cctcttagccttgagacatccctgaccaggcagggcacacca

SEQ ID NO: 3528 - DNA, 42 bp, Aspergillus novofumigatus; identical to SEQ ID NO: 3440
  source 1..42: mol_type = other DNA

SEQ ID NO: 3529 - DNA, 42 bp, Aspergillus novofumigatus; identical to SEQ ID NO: 3441
  source 1..42: mol_type = other DNA

SEQ ID NO: 3530 - DNA, 42 bp, Aspergillus phoenicis; identical to SEQ ID NO: 3512
  source 1..42: mol_type = other DNA

SEQ ID NO: 3531 - DNA, 42 bp, Aspergillus phoenicis; identical to SEQ ID NO: 3395
  source 1..42: mol_type = other DNA

SEQ ID NO: 3532 - DNA, 42 bp, Aspergillus piperis
  source 1..42: mol_type = other DNA
acgcttgatcatgttgcatggctggccagggagatgacacca

SEQ ID NO: 3533 - DNA, 42 bp, Aspergillus piperis
  source 1..42: mol_type = other DNA
ccgcttgatcttgttgcagggctgaccaggcaggacacacca

SEQ ID NO: 3534 - DNA, 42 bp, Aspergillus saccharolyticus; identical to SEQ ID NO: 3402
  source 1..42: mol_type = other DNA

SEQ ID NO: 3535 - DNA, 42 bp, Aspergillus saccharolyticus
  source 1..42: mol_type = other DNA
tcgcttgatcttttggcacggttgtccaggcaagtaacacca

SEQ ID NO: 3536 - DNA, 42 bp, Aspergillus sclerotialis
  source 1..42: mol_type = other DNA
tggtgctacttgcccggtcagggatgtaataagatgaagcgt

SEQ ID NO: 3537 - DNA, 42 bp, Aspergillus sclerotialis
  source 1..42: mol_type = other DNA
tggtgctatcttccaggccaaggttgctatatgctcaagcgc

SEQ ID NO: 3538 - DNA, 42 bp, Aspergillus sclerotiicarbonarius
  source 1..42: mol_type = other DNA
tggtgctatctgcccggccagccatgcaccaaaatcaagcgg

SEQ ID NO: 3539 - DNA, 42 bp, Aspergillus sclerotiicarbonarius
  source 1..42: mol_type = other DNA
tggtgttacctccctggccagccatgcaccatgatcaaacgt

SEQ ID NO: 3540 - DNA, 42 bp, Aspergillus taichungensis
  source 1..42: mol_type = other DNA
tggtgccatttccccggccaaggatgccagaaagccaagcgg

SEQ ID NO: 3541 - DNA, 42 bp, Aspergillus taichungensis
  source 1..42: mol_type = other DNA
tggtgtcacttcccgggccaaggctgctacatgctcaagcgt

SEQ ID NO: 3542 - DNA, 42 bp, Aspergillus terreus
  source 1..42: mol_type = other DNA
acgcttgaccttgagacagccctggcccggcagccagcacca

SEQ ID NO: 3543 - DNA, 42 bp, Aspergillus terreus
  source 1..42: mol_type = other DNA
ccgcttgagcatgtagcagccctggccggggagccagcacca

SEQ ID NO: 3544 - DNA, 42 bp, Aspergillus terreus; identical to SEQ ID NO: 3542
  source 1..42: mol_type = other DNA

SEQ ID NO: 3545 - DNA, 42 bp, Aspergillus terreus; identical to SEQ ID NO: 3543
  source 1..42: mol_type = other DNA

SEQ ID NO: 3546 - DNA, 42 bp, Aspergillus thermomutatus
  source 1..42: mol_type = other DNA
tggtgccaccttcctggtcagggctgcgccaaggcgaagaga

SEQ ID NO: 3547 - DNA, 42 bp, Aspergillus thermomutatus
  source 1..42: mol_type = other DNA
tggtgccagcttcctggtcagggttgctacatgctcaagcgc

SEQ ID NO: 3548 - DNA, 42 bp, Aspergillus tubingensis; identical to SEQ ID NO: 3416
  source 1..42: mol_type = other DNA

SEQ ID NO: 3549 - DNA, 42 bp, Aspergillus tubingensis; identical to SEQ ID NO: 3417
  source 1..42: mol_type = other DNA

SEQ ID NO: 3550 - DNA, 42 bp, Aspergillus tubingensis; identical to SEQ ID NO: 3504
  source 1..42: mol_type = other DNA

SEQ ID NO: 3551 - DNA, 42 bp, Aspergillus tubingensis; identical to SEQ ID NO: 3515
  source 1..42: mol_type = other DNA

SEQ ID NO: 3552 - DNA, 42 bp, Aspergillus turcosus
  source 1..42: mol_type = other DNA
tggtgccatcttcctggtcagggctgtgccaaggccaagaga

SEQ ID NO: 3553 - DNA, 42 bp, Aspergillus turcosus; identical to SEQ ID NO: 3441
  source 1..42: mol_type = other DNA

SEQ ID NO: 3554 - DNA, 42 bp, Aspergillus turcosus
  source 1..42: mol_type = other DNA
tctcttggccttggcacagccctgaccaggaagatggcacca

SEQ ID NO: 3555 - DNA, 42 bp, Aspergillus turcosus; identical to SEQ ID NO: 3425
  source 1..42: mol_type = other DNA

SEQ ID NO: 3556 - DNA, 42 bp, Aspergillus udagawae
  source 1..42: mol_type = other DNA
tctcttcgccttggcgcaaccttgaccaggaagatggcacca

SEQ ID NO: 3557 - DNA, 42 bp, Aspergillus udagawae
  source 1..42: mol_type = other DNA
acgcttaagcatgtagcaaccctggccaggaagatggcacca

SEQ ID NO: 3558 - DNA, 42 bp, Aspergillus udagawae; identical to SEQ ID NO: 3556
  source 1..42: mol_type = other DNA

SEQ ID NO: 3559 - DNA, 42 bp, Aspergillus udagawae
  source 1..42: mol_type = other DNA
acgcttaagcttgtagcaaccctgaccaggaagatggcacca

SEQ ID NO: 3560 - DNA, 42 bp, Aspergillus udagawae
  source 1..42: mol_type = other DNA
tggtgccatcttcctggtcaaggttgcgccaaggcgaagaga

SEQ ID NO: 3561 - DNA, 42 bp, Aspergillus udagawae
  source 1..42: mol_type = other DNA
tggtgccatcttcctggccagggttgctacatgcttaagcgt

SEQ ID NO: 3562 - DNA, 42 bp, Aspergillus udagawae; identical to SEQ ID NO: 3560
  source 1..42: mol_type = other DNA

SEQ ID NO: 3563 - DNA, 42 bp, Aspergillus udagawae
  source 1..42: mol_type = other DNA
tggtgccatcttcctggtcagggttgctacaagcttaagcgt

SEQ ID NO: 3564 - DNA, 42 bp, Aspergillus udagawae; identical to SEQ ID NO: 3556
  source 1..42: mol_type = other DNA

SEQ ID NO: 3565 - DNA, 42 bp, Aspergillus udagawae; identical to SEQ ID NO: 3559
  source 1..42: mol_type = other DNA

SEQ ID NO: 3566 - DNA, 42 bp, Aspergillus uvarum
  source 1..42: mol_type = other DNA
tggtgctacctccctggccagccttgtgccatgatgaagcgt

SEQ ID NO: 3567 - DNA, 42 bp, Aspergillus uvarum
  source 1..42: mol_type = other DNA
tggtgctacctgcctggtcaaccatgccagaagatcaagcga

SEQ ID NO: 3568 - DNA, 42 bp, Aspergillus vadensis; identical to SEQ ID NO: 3416
  source 1..42: mol_type = other DNA

SEQ ID NO: 3569 - DNA, 42 bp, Aspergillus vadensis; identical to SEQ ID NO: 3516
  source 1..42: mol_type = other DNA

SEQ ID NO: 3570 - DNA, 42 bp, Aspergillus violaceofuscus; identical to SEQ ID NO: 3402
  source 1..42: mol_type = other DNA

SEQ ID NO: 3571 - DNA, 42 bp, Aspergillus violaceofuscus; identical to SEQ ID NO: 3475
  source 1..42: mol_type = other DNA

SEQ ID NO: 3572 - DNA, 42 bp, Aspergillus welwitschiae; identical to SEQ ID NO: 3394
  source 1..42: mol_type = other DNA

SEQ ID NO: 3573 - DNA, 42 bp, Aspergillus welwitschiae; identical to SEQ ID NO: 3395
  source 1..42: mol_type = other DNA

SEQ ID NO: 3574 - DNA, 42 bp, Aulographum hederae
  source 1..42: mol_type = other DNA
ttctgtcatctccccggccaagtctgcggcaaagcaaagcgt

SEQ ID NO: 3575 - DNA, 42 bp, Aulographum hederae
  source 1..42: mol_type = other DNA
ttctgccatcttcccggtcaagtttgcggcaaggcgaggagg

SEQ ID NO: 3576 - DNA, 42 bp, Aulographum hederae
  source 1..42: mol_type = other DNA
ttctgtcatcttcccggtcaggtctgtggaaagctgaagcgt

SEQ ID NO: 3577 - DNA, 42 bp, Aulographum hederae
  source 1..42: mol_type = other DNA
ttctgccatctccccggccaagtctgtggcaaagtcaagcgc

SEQ ID NO: 3578 - DNA, 39 bp, Aulographum hederae
  source 1..39: mol_type = other DNA
ttctgccatctcccaggacgagtgtgtggcaagaagcgc

SEQ ID NO: 3579 - DNA, 42 bp, Beauveria bassiana
  source 1..42: mol_type = other DNA
tggtgcatgagacccggtcagccatgctggaaggctaagcgc

SEQ ID NO: 3580 - DNA, 42 bp, Beauveria bassiana
  source 1..42: mol_type = other DNA
tggtgcatgagacccggccagccatgctggaagctcaagcgc

SEQ ID NO: 3581 - DNA, 33 bp, Beauveria bassiana
  source 1..33: mol_type = other DNA
tggtgcatgagacccggccagccatgctggaag

SEQ ID NO: 3582 - DNA, 42 bp, Beauveria bassiana; identical to SEQ ID NO: 3579
  source 1..42: mol_type = other DNA

SEQ ID NO: 3583 - DNA, 42 bp, Beauveria bassiana; identical to SEQ ID NO: 3580
  source 1..42: mol_type = other DNA

SEQ ID NO: 3584 - DNA, 33 bp, Beauveria bassiana; identical to SEQ ID NO: 3581
  source 1..33: mol_type = other DNA

SEQ ID NO: 3585 - DNA, 42 bp, Beauveria bassiana; identical to SEQ ID NO: 3579
  source 1..42: mol_type = other DNA

SEQ ID NO: 3586 - DNA, 42 bp, Beauveria bassiana; identical to SEQ ID NO: 3580
  source 1..42: mol_type = other DNA

SEQ ID NO: 3587 - DNA, 33 bp, Beauveria bassiana; identical to SEQ ID NO: 3581
  source 1..33: mol_type = other DNA

SEQ ID NO: 3588 - DNA, 42 bp, Beauveria bassiana; identical to SEQ ID NO: 3579
  source 1..42: mol_type = other DNA

SEQ ID NO: 3589 - DNA, 42 bp, Beauveria bassiana; identical to SEQ ID NO: 3580
  source 1..42: mol_type = other DNA

SEQ ID NO: 3590 - DNA, 33 bp, Beauveria bassiana; identical to SEQ ID NO: 3581
  source 1..33: mol_type = other DNA

SEQ ID NO: 3591 - DNA, 42 bp, Beauveria brongniartii
  source 1..42: mol_type = other DNA
gcgcttggccttccagcatggttcaccgggtctcaggcacca

SEQ ID NO: 3592 - DNA, 42 bp, Beauveria brongniartii
  source 1..42: mol_type = other DNA
gcgcttgagcttccagcatggctggccgggtctcaagcacca

SEQ ID NO: 3593 - DNA, 33 bp, Beauveria brongniartii
  source 1..33: mol_type = other DNA
gcgcttccagcacttgcggttctgcatgcacca

SEQ ID NO: 3594 - DNA, 42 bp, Botryosphaeria dothidea
  source 1..42: mol_type = other DNA
ttctgccacgacgaaggccagccgtgctacaggttgaagcgt

SEQ ID NO: 3595 - DNA, 39 bp, Botryosphaeria dothidea
  source 1..39: mol_type = other DNA
tactgccacttccgcggctccgcctgtcctaagaagcgt

SEQ ID NO: 3596 - DNA, 39 bp, Botryosphaeria dothidea
  source 1..39: mol_type = other DNA
tactgccgcttccgtggctctgcttgtcccaagaagcgt

SEQ ID NO: 3597 - DNA, 39 bp, Botryosphaeria dothidea
  source 1..39: mol_type = other DNA
tactgccgcttccgtggctcagtctgtcccaagaagcgg

SEQ ID NO: 3598 - DNA, 42 bp, Botryosphaeria dothidea; identical to SEQ ID NO: 3594
  source 1..42: mol_type = other DNA

SEQ ID NO: 3599 - DNA, 39 bp, Botryosphaeria dothidea; identical to SEQ ID NO: 3595
  source 1..39: mol_type = other DNA

SEQ ID NO: 3600 - DNA, 39 bp, Botryosphaeria dothidea; identical to SEQ ID NO: 3596
  source 1..39: mol_type = other DNA

SEQ ID NO: 3601 - DNA, 39 bp, Botryosphaeria dothidea; identical to SEQ ID NO: 3597
  source 1..39: mol_type = other DNA

SEQ ID NO: 3602 - DNA, 39 bp, Botryotinia calthae
  source 1..39: mol_type = other DNA
tgtaacatggttggaggagcttgcttcgaggccaagaga

SEQ ID NO: 3603 - DNA, 33 bp, Botryotinia calthae
  source 1..33: mol_type = other DNA
tggtgcggacgccacggtcaaccatgcaagcgc

SEQ ID NO: 3604 - DNA, 30 bp, Botryotinia calthae
  source 1..30: mol_type = other DNA
tggtgcggacgcccaggacaaccatgtaag

SEQ ID NO: 3605 - DNA, 33 bp, Botryotinia calthae
  source 1..33: mol_type = other DNA
tggtgcggacgcccaggacaaccatgtaagcgc

SEQ ID NO: 3606 - DNA, 39 bp, Botryotinia calthae
  source 1..39: mol_type = other DNA
tggtgcggacgcccaggacaaccatgtaagcgcgaggct

SEQ ID NO: 3607 - DNA, 42 bp, Botryotinia calthae
  source 1..42: mol_type = other DNA
tggtgcggacgtcccggacaaccttgccgtgctgtcaagcgt

SEQ ID NO: 3608 - DNA, 42 bp, Botryotinia calthae
  source 1..42: mol_type = other DNA
tggtgcggacgtcctggtcaaccttgccgcaaggccaagaga

SEQ ID NO: 3609 - DNA, 42 bp, Botryotinia calthae
  source 1..42: mol_type = other DNA
tggtgcggacgtccaggacaaccttgccgcaagaacaagcgc

SEQ ID NO: 3610 - DNA, 33 bp, Botryotinia calthae
  source 1..33: mol_type = other DNA
tggtgcagacgcccaggacaaccatgcaagaga

SEQ ID NO: 3611 - DNA, 39 bp, Botryotinia convoluta
  source 1..39: mol_type = other DNA
tgcaacatggttggaggagcttgcttcgaggccaagaga

SEQ ID NO: 3612 - DNA, 30 bp, Botryotinia convoluta; identical to SEQ ID NO: 3604
  source 1..30: mol_type = other DNA

SEQ ID NO: 3613 - DNA, 33 bp, Botryotinia convoluta; identical to SEQ ID NO: 3605
  source 1..33: mol_type = other DNA

SEQ ID NO: 3614 - DNA, 42 bp, Botryotinia convoluta
  source 1..42: mol_type = other DNA
tggtgcggacgtcccggacaaccttgccgtgccgttaagcgt

SEQ ID NO: 3615 - DNA, 42 bp, Botryotinia convoluta
  source 1..42: mol_type = other DNA
tggtgcggacgcccaggacaaccttgccgcaaggccaagaga

SEQ ID NO: 3616 - DNA, 42 bp, Botryotinia convoluta
  source 1..42: mol_type = other DNA
tggtgcggacgcccaggacaaccttgccgcaagaacaagcgc

SEQ ID NO: 3617 - DNA, 39 bp, Botryotinia narcissicola
  source 1..39: mol_type = other DNA
tctcttggcctcgaagcaagctcctccaaccatgttgca

SEQ ID NO: 3618 - DNA, 39 bp, Botryotinia narcissicola
  source 1..39: mol_type = other DNA
acgcttctccttgcatggttgaccggggcgtccgcacca

SEQ ID NO: 3619 - DNA, 33 bp, Botryotinia narcissicola
  source 1..33: mol_type = other DNA
acgcttacatggttgaccgggacgtccgcacca

SEQ ID NO: 3620 - DNA, 42 bp, Botryotinia narcissicola
  source 1..42: mol_type = other DNA
acgcttgacggcacggcaaggttgtccaggacgtccacacca

SEQ ID NO: 3621 - DNA, 42 bp, Botryotinia narcissicola
  source 1..42: mol_type = other DNA
tctcttggccttgcggcaaggttgtccaggacgtccgcacca

SEQ ID NO: 3622 - DNA, 42 bp, Botryotinia narcissicola
  source 1..42: mol_type = other DNA
gcgcttgttcttgcggcaaggttgtcctgggcgtccgcacca

SEQ ID NO: 3623 - DNA, 39 bp, Botrytis cinerea; identical to SEQ ID NO: 3617
  source 1..39: mol_type = other DNA

SEQ ID NO: 3624 - DNA, 39 bp, Botrytis cinerea
  source 1..39: mol_type = other DNA
acgcttctccttgcatggctgtccggggcgtccgcacca

SEQ ID NO: 3625 - DNA, 33 bp, Botrytis cinerea
  source 1..33: mol_type = other DNA
acgcttacatggttgaccgggacgtccacacca

SEQ ID NO: 3626 - DNA, 33 bp, Botrytis cinerea
  source 1..33: mol_type = other DNA
acgcttgcatggttgtcctgggcgtccgcacca

SEQ ID NO: 3627 - DNA, 33 bp, Botrytis cinerea
  source 1..33: mol_type = other DNA
acgcttgcatggctgtccgggacgtccacacca

SEQ ID NO: 3628 - DNA, 42 bp, Botrytis cinerea
  source 1..42: mol_type = other DNA
acgcttgacggcacggcaaggttgtccggggcgtccgcacca

SEQ ID NO: 3629 - DNA, 42 bp, Botrytis cinerea
  source 1..42: mol_type = other DNA
tctcttggccttgcggcaaggttgtccgggacgtccgcacca

SEQ ID NO: 3630 - DNA, 42 bp, Botrytis cinerea
  source 1..42: mol_type = other DNA
gcgcttgttcttgcggcaaggttgtcctggacgtccgcacca

SEQ ID NO: 3631 - DNA, 39 bp, Botrytis cinerea; identical to SEQ ID NO: 3617
  source 1..39: mol_type = other DNA

SEQ ID NO: 3632 - DNA, 39 bp, Botrytis cinerea; identical to SEQ ID NO: 3624
  source 1..39: mol_type = other DNA

SEQ ID NO: 3633 - DNA, 33 bp, Botrytis cinerea
  source 1..33: mol_type = other DNA
acgcttacatggttgacctggacgtccacacca

SEQ ID NO: 3634 - DNA, 33 bp, Botrytis cinerea; identical to SEQ ID NO: 3626
  source 1..33: mol_type = other DNA

SEQ ID NO: 3635 - DNA, 33 bp, Botrytis cinerea; identical to SEQ ID NO: 3627
  source 1..33: mol_type = other DNA

SEQ ID NO: 3636 - DNA, 42 bp, Botrytis cinerea; identical to SEQ ID NO: 3628
  source 1..42: mol_type = other DNA

SEQ ID NO: 3637 - DNA, 42 bp, Botrytis cinerea; identical to SEQ ID NO: 3629
  source 1..42: mol_type = other DNA

SEQ ID NO: 3638 - DNA, 42 bp, Botrytis cinerea; identical to SEQ ID NO: 3630
  source 1..42: mol_type = other DNA

SEQ ID NO: 3639 - DNA, 39 bp, Botrytis cinerea; identical to SEQ ID NO: 3617
  source 1..39: mol_type = other DNA

SEQ ID NO: 3640 - DNA, 39 bp, Botrytis cinerea; identical to SEQ ID NO: 3624
  source 1..39: mol_type = other DNA

SEQ ID NO: 3641 - DNA, 33 bp, Botrytis cinerea; identical to SEQ ID NO: 3625
  source 1..33: mol_type = other DNA

SEQ ID NO: 3642 - DNA, 33 bp, Botrytis cinerea; identical to SEQ ID NO: 3626
  source 1..33: mol_type = other DNA

SEQ ID NO: 3643 - DNA, 33 bp, Botrytis cinerea; identical to SEQ ID NO: 3627
  source 1..33: mol_type = other DNA

SEQ ID NO: 3644 - DNA, 42 bp, Botrytis cinerea
  source 1..42: mol_type = other DNA
acgcttgacggcacggcaaggttgaccggggcgtccgcacca

SEQ ID NO: 3645 - DNA, 42 bp, Botrytis cinerea; identical to SEQ ID NO: 3629
  source 1..42: mol_type = other DNA

SEQ ID NO: 3646 - DNA, 42 bp, Botrytis cinerea; identical to SEQ ID NO: 3630
  source 1..42: mol_type = other DNA

SEQ ID NO: 3647 - DNA, 39 bp, Botrytis elliptica; identical to SEQ ID NO: 3611
  source 1..39: mol_type = other DNA

SEQ ID NO: 3648 - DNA, 42 bp, Botrytis elliptica
  source 1..42: mol_type = other DNA
tggtgcggacttccaggacaaccttgccgcaaggctaagaga

SEQ ID NO: 3649 - DNA, 33 bp, Botrytis elliptica
  source 1..33: mol_type = other DNA
tggtgcggacgcccaggacaaccatgcaagaga

SEQ ID NO: 3650 - DNA, 42 bp, Botrytis elliptica
  source 1..42: mol_type = other DNA
tggtgcggacgtcccggacaaccttgccgtgccgtcaagcgt

SEQ ID NO: 3651 - DNA, 42 bp, Botrytis elliptica
  source 1..42: mol_type = other DNA
tggtgcggacgccctggacaaccttgccgcaagaacaagcgc

SEQ ID NO: 3652 - DNA, 39 bp, Botrytis fragariae
  source 1..39: mol_type = other DNA
tctcttcgcctcgaagcaagctcctccaaccatgttgca

SEQ ID NO: 3653 - DNA, 39 bp, Botrytis fragariae
  source 1..39: mol_type = other DNA
acgcttctccttgcatggttgaccagggcgtccgcacca

SEQ ID NO: 3654 - DNA, 33 bp, Botrytis fragariae
  source 1..33: mol_type = other DNA
acgcttacatggttgaccagggcgtccacacca

SEQ ID NO: 3655 - DNA, 42 bp, Botrytis fragariae
  source 1..42: mol_type = other DNA
acgcttgacggcacggcaaggttgtccgggacgtccgcacca

SEQ ID NO: 3656 - DNA, 33 bp, Botrytis fragariae; identical to SEQ ID NO: 3654
  source 1..33: mol_type = other DNA

SEQ ID NO: 3657 - DNA, 39 bp, Botrytis fragariae; identical to SEQ ID NO: 3653
  source 1..39: mol_type = other DNA

SEQ ID NO: 3658 - DNA, 39 bp, Botrytis galanthina; identical to SEQ ID NO: 3617
  source 1..39: mol_type = other DNA

SEQ ID NO: 3659 - DNA, 39 bp, Botrytis galanthina
  source 1..39: mol_type = other DNA
acgcttctccttgcatggttgtccggggcgtccgcacca

SEQ ID NO: 3660 - DNA, 33 bp, Botrytis galanthina
  source 1..33: mol_type = other DNA
acgcttacatggttgtccgggacgtccacacca

SEQ ID NO: 3661 - DNA, 42 bp, Botrytis galanthina
  source 1..42: mol_type = other DNA
acgcttaacggcacggcaaggttgtccgggacgtccgcacca

SEQ ID NO: 3662 - DNA, 42 bp, Botrytis galanthina
  source 1..42: mol_type = other DNA
tctcttggccttgcggcaaggttgtcctggacgtccgcacca

SEQ ID NO: 3663 - DNA, 42 bp, Botrytis galanthina; identical to SEQ ID NO: 3622
  source 1..42: mol_type = other DNA

SEQ ID NO: 3664 - DNA, 39 bp, Botrytis hyacinthi; identical to SEQ ID NO: 3611
  source 1..39: mol_type = other DNA

SEQ ID NO: 3665 - DNA, 30 bp, Botrytis hyacinthi; identical to SEQ ID NO: 344
  source 1..30: mol_type = other DNA

SEQ ID NO: 3666 - DNA, 33 bp, Botrytis hyacinthi; identical to SEQ ID NO: 3649
  source 1..33: mol_type = other DNA

SEQ ID NO: 3667 - DNA, 42 bp, Botrytis hyacinthi
  source 1..42: mol_type = other DNA
tggtgcggacgtccaggacaaccttgccgcaaggccaagaga

SEQ ID NO: 3668 - DNA, 42 bp, Botrytis hyacinthi; identical to SEQ ID NO: 3616
  source 1..42: mol_type = other DNA

SEQ ID NO: 3669 - DNA, 27 bp, Botrytis hyacinthi
  source 1..27: mol_type = other DNA
tggtgcggacgcccaggacaaccatgc

SEQ ID NO: 3670 - DNA, 39 bp, Botrytis paeoniae; identical to SEQ ID NO: 3611
  source 1..39: mol_type = other DNA

SEQ ID NO: 3671 - DNA, 30 bp, Botrytis paeoniae; identical to SEQ ID NO: 3604
  source 1..30: mol_type = other DNA

SEQ ID NO: 3672 - DNA, 33 bp, Botrytis paeoniae; identical to SEQ ID NO: 3605
  source 1..33: mol_type = other DNA

SEQ ID NO: 3673 - DNA, 42 bp, Botrytis paeoniae
  source 1..42: mol_type = other DNA
tggtgtggacgtcccggacaaccttgtcgtgccgttaagcgt

SEQ ID NO: 3674 - DNA, 42 bp, Botrytis paeoniae
  source 1..42: mol_type = other DNA
tggtgcggacgtcccggacaaccttgccgcaaggccaagaga

SEQ ID NO: 3675 - DNA, 42 bp, Botrytis paeoniae; identical to SEQ ID NO: 3616
  source 1..42: mol_type = other DNA

SEQ ID NO: 3676 - DNA, 33 bp, Botrytis paeoniae
  source 1..33: mol_type = other DNA
tggtgcggacgctccggtcaaccatgtaaacgt

SEQ ID NO: 3677 - DNA, 33 bp, Botrytis porri
  source 1..33: mol_type = other DNA
tggtgcggacgccccggacaaccatgcaagcgt

SEQ ID NO: 3678 - DNA, 42 bp, Botrytis porri
  source 1..42: mol_type = other DNA
tggtgcggacgcccaggacaaccttgccgtgccgttaagcgt

SEQ ID NO: 3679 - DNA, 42 bp, Botrytis porri; identical to SEQ ID NO: 3615
  source 1..42: mol_type = other DNA

SEQ ID NO: 3680 - DNA, 39 bp, Botrytis tulipae; identical to SEQ ID NO: 3617
  source 1..39: mol_type = other DNA

SEQ ID NO: 3681 - DNA, 39 bp, Botrytis tulipae; identical to SEQ ID NO: 3659
  source 1..39: mol_type = other DNA

SEQ ID NO: 3682 - DNA, 33 bp, Botrytis tulipae; identical to SEQ ID NO: 3660
  source 1..33: mol_type = other DNA

SEQ ID NO: 3683 - DNA, 42 bp, Botrytis tulipae
  source 1..42: mol_type = other DNA
acgcttaacggcacggcaaggttgtccgggacgtccacacca

SEQ ID NO: 3684 - DNA, 42 bp, Botrytis tulipae; identical to SEQ ID NO: 3662
  source 1..42: mol_type = other DNA

SEQ ID NO: 3685 - DNA, 42 bp, Botrytis tulipae
  source 1..42: mol_type = other DNA
gcgcttgttcttgcggcaaggctgtcctgggcgtccgcacca

SEQ ID NO: 3686 - DNA, 30 bp, Cadophora sp.
  source 1..30: mol_type = other DNA; note = DSE1049
tgcggacacccagggcagccatgtggaaag

SEQ ID NO: 3687 - DNA, 33 bp, Cadophora sp.
  source 1..33: mol_type = other DNA; note = DSE1049
tgcggacacccagggcagccatgtggaaagcgt

SEQ ID NO: 3688 - DNA, 33 bp, Cenococcum geophilum
  source 1..33: mol_type = other DNA
gcagcgccaaacgccgttaccaagctcaagcgt

SEQ ID NO: 3689 - DNA, 39 bp, Cenococcum geophilum
  source 1..39: mol_type = other DNA
tgccatctcccaggccagtcttgcggcaagatcaagcgc

SEQ ID NO: 3690 - DNA, 42 bp, Cenococcum geophilum
  source 1..42: mol_type = other DNA
ggatgccatcttccaggtcaatcatgcggcaaagccaagcgt

SEQ ID NO: 3691 - DNA, 51 bp, Cenococcum geophilum
  source 1..51: mol_type = other DNA
tacatccacggatgccatcttccaggtcaatcatgcggcaaagccaagcgt

SEQ ID NO: 3692 - DNA, 27 bp, Chaetomium thermophilum
  source 1..27: mol_type = other DNA
tgcactgggcagtcatgctggaagcgc

SEQ ID NO: 3693 - DNA, 42 bp, Chaetomium thermophilum
  source 1..42: mol_type = other DNA
cggtgcatctccgaaggcggcgcttgctggcgggcgaagcgt

SEQ ID NO: 3694 - DNA, 39 bp, Chaetomium thermophilum
  source 1..39: mol_type = other DNA
tcctgcacccgtttcgtcggtgagtcctgctggaagcgc

SEQ ID NO: 3695 - DNA, 42 bp, Chaetomium thermophilum
  source 1..42: mol_type = other DNA
tggtgtgagatggctggccaagcctgcgataccgtcaagcgc

SEQ ID NO: 3696 - DNA, 39 bp, Chaetomium thermophilum
  source 1..39: mol_type = other DNA
tggtgtaaattgttcccggggcagccgtgctggaagcgg

SEQ ID NO: 3697 - DNA, 39 bp, Chaetomium thermophilum
  source 1..39: mol_type = other DNA
tggtgcacacggtttcccggccagccatgctggaagcgc

SEQ ID NO: 3698 - DNA, 39 bp, Chalara longipes
  source 1..39: mol_type = other DNA
tgcggtgcgagaggacaaccttgtggcaaggccaaaaga

SEQ ID NO: 3699 - DNA, 39 bp, Chalara longipes
  source 1..39: mol_type = other DNA
tgtggagctcgaggacaaccttgcggcaaagttaaacgt

SEQ ID NO: 3700 - DNA, 27 bp, Chlorociboria aeruginascens
  source 1..27: mol_type = other DNA
tgtgggaggcccggtcaggggtgcaaa

SEQ ID NO: 3701 - DNA, 42 bp, Chlorociboria aeruginascens
  source 1..42: mol_type = other DNA
tgtggcagacccggccaaggttgtaaagacaaattgaagaga

SEQ ID NO: 3702 - DNA, 27 bp, Chlorociboria aeruginascens
  source 1..27: mol_type = other DNA
tgtggcagacccggccaaggttgtaaa

SEQ ID NO: 3703 - DNA, 39 bp, Chlorociboria aeruginascens
  source 1..39: mol_type = other DNA
tgtggtcgtccaggccagggttgccgaaaagccaaaaga

SEQ ID NO: 3704 - DNA, 39 bp, Chlorociboria aeruginascens
  source 1..39: mol_type = other DNA
tgtggctcggagggacaaccctgcgcacgagtgaagaga

SEQ ID NO: 3705 - DNA, 39 bp, Chlorociboria aeruginascens
  source 1..39: mol_type = other DNA
tgtaacctcgttggaggtgcatgctatgaagcgaagcgt

SEQ ID NO: 3706 - DNA, 42 bp, Claviceps purpurea
  source 1..42: mol_type = other DNA
tggtgctggcgccctggtgaaggttgctggaaggctaagcgg

SEQ ID NO: 3707 - DNA, 42 bp, Claviceps purpurea
  source 1..42: mol_type = other DNA
tggtgctggcgccctggccagggatgctggaaggtcaagcgc

SEQ ID NO: 3708 - DNA, 30 bp, Coleophoma cylindrospora
  source 1..30: mol_type = other DNA
gcgtttacagggttgtccaagtctgccaca

SEQ ID NO: 3709 - DNA, 24 bp, Coleophoma cylindrospora
  source 1..24: mol_type = other DNA
gcacggttgacccatccgtccgca

SEQ ID NO: 3710 - DNA, 36 bp, Colletotrichum aenigma
  source 1..36: mol_type = other DNA
tggtgcaccaaacctggccagccctgctggaaacgc

SEQ ID NO: 3711 - DNA, 36 bp, Colletotrichum aenigma
  source 1..36: mol_type = other DNA
tggtgcaccgaacccggccagccctgctggaaacgc

SEQ ID NO: 3712 - DNA, 36 bp, Colletotrichum aenigma
  source 1..36: mol_type = other DNA
tggtgcaccaagcccgaccaaccgtgctggaagcgc

SEQ ID NO: 3713 - DNA, 36 bp, Colletotrichum aenigma
  source 1..36: mol_type = other DNA
tggtgcaccaaacccggccagccctgctggaagcgc

SEQ ID NO: 3714 - DNA, 36 bp, Colletotrichum aenigma
  source 1..36: mol_type = other DNA
tggtgcactcagcccgggcagccatgctggaagcgt

SEQ ID NO: 3715 - DNA, 36 bp, Colletotrichum fructicola
  source 1..36: mol_type = other DNA
tggtgcaacaaacccggccagccctgctggaaacgc

SEQ ID NO: 3716 - DNA, 36 bp, Colletotrichum fructicola
  source 1..36: mol_type = other DNA
tggtgcaccaagcccggccagccatgctggaagcgc

SEQ ID NO: 3717 - DNA, 36 bp, Colletotrichum fructicola
  source 1..36: mol_type = other DNA
gcgtttccagcagggctggccgggtttgttgcacca

SEQ ID NO: 3718 - DNA, 36 bp, Colletotrichum fructicola
  source 1..36: mol_type = other DNA
acgcttccagcatggctgtccgggcttagtgcacca

SEQ ID NO: 3719 - DNA, 36 bp, Colletotrichum fructicola; identical to SEQ ID NO: 3717
  source 1..36: mol_type = other DNA

SEQ ID NO: 3720 - DNA, 36 bp, Colletotrichum fructicola; identical to SEQ ID NO: 3718
  source 1..36: mol_type = other DNA

SEQ ID NO: 3721 - DNA, 36 bp, Colletotrichum fructicola; identical to SEQ ID NO: 3715
  source 1..36: mol_type = other DNA

SEQ ID NO: 3722 - DNA, 36 bp, Colletotrichum fructicola; identical to SEQ ID NO: 3716
  source 1..36: mol_type = other DNA

SEQ ID NO: 3723 - DNA, 36 bp, Colletotrichum fructicola; identical to SEQ ID NO: 3717
  source 1..36: mol_type = other DNA

SEQ ID NO: 3724 - DNA, 36 bp, Colletotrichum fructicola; identical to SEQ ID NO: 3718
  source 1..36: mol_type = other DNA

SEQ ID NO: 3725 - DNA, 36 bp, Colletotrichum fructicola; identical to SEQ ID NO: 3715
  source 1..36: mol_type = other DNA

SEQ ID NO: 3726 - DNA, 36 bp, Colletotrichum fructicola; identical to SEQ ID NO: 3716
  source 1..36: mol_type = other DNA

SEQ ID NO: 3727 - DNA, 36 bp, Colletotrichum fructicola; identical to SEQ ID NO: 3715
  source 1..36: mol_type = other DNA

SEQ ID NO: 3728 - DNA, 36 bp, Colletotrichum fructicola; identical to SEQ ID NO: 3716
  source 1..36: mol_type = other DNA

SEQ ID NO: 3729 - DNA, 36 bp, Colletotrichum gloeosporioides
  source 1..36: mol_type = other DNA
acgcttccagcagggctggccgggcttggtgcacca

SEQ ID NO: 3730 - DNA, 42 bp, Colletotrichum higginsianum
  source 1..42: mol_type = other DNA
tggtgccgcagcgtcggtcagccctgctggaaggtgaagcgc

SEQ ID NO: 3731 - DNA, 42 bp, Colletotrichum higginsianum
  source 1..42: mol_type = other DNA
tggtgcagccagccgggggcgccgtgctccgtcgccaagcga

SEQ ID NO: 3732 - DNA, 42 bp, Colletotrichum higginsianum; identical to SEQ ID NO: 3730
  source 1..42: mol_type = other DNA

SEQ ID NO: 3733 - DNA, 42 bp, Colletotrichum higginsianum; identical to SEQ ID NO: 3731
  source 1..42: mol_type = other DNA

SEQ ID NO: 3734 - DNA, 48 bp, Colletotrichum orchidophilum
  source 1..48: mol_type = other DNA
cgctgccaaagtatcggccagccttgctggaaggcgagagtcaagcgc

SEQ ID NO: 3735 - DNA, 42 bp, Colletotrichum orchidophilum
  source 1..42: mol_type = other DNA
tggtgccaaaacgtaggcgagccctgctggagggtgaagcgc

SEQ ID NO: 3736 - DNA, 39 bp, Colletotrichum orchidophilum
  source 1..39: mol_type = other DNA
tggtgccaaagcgtcggccagtcttgctggaaggacaag

SEQ ID NO: 3737 - DNA, 42 bp, Colletotrichum salicis
  source 1..42: mol_type = other DNA
tggtgcaataggaagctcattgggcagccgtgctggaagcgc

SEQ ID NO: 3738 - DNA, 42 bp, Colletotrichum salicis
  source 1..42: mol_type = other DNA
tggtgccaggccgtaggccaaggctgctggaaggtcaaacgc

SEQ ID NO: 3739 - DNA, 39 bp, Colletotrichum salicis
  source 1..39: mol_type = other DNA
tggtgccaagacatcaaccagccatgctggaagacaaag

SEQ ID NO: 3740 - DNA, 42 bp, Colletotrichum shisoi; identical to SEQ ID NO: 3730
  source 1..42: mol_type = other DNA

SEQ ID NO: 3741 - DNA, 42 bp, Colletotrichum shisoi
  source 1..42: mol_type = other DNA
tggtgccgcaccgtcggccagccgtgctggaaggctaagagg

SEQ ID NO: 3742 - DNA, 42 bp, Colletotrichum shisoi; identical to SEQ ID NO: 3731
  source 1..42: mol_type = other DNA

SEQ ID NO: 3743 - DNA, 36 bp, Colletotrichum siamense
  source 1..36: mol_type = other DNA
acgcttccagcagggctggccgggcttcgtgcacca

SEQ ID NO: 3744 - DNA, 36 bp, Colletotrichum siamense
  source 1..36: mol_type = other DNA
cctcttccagcacggctgcccaggcttcgtgcacca

SEQ ID NO: 3745 - DNA, 36 bp, Colletotrichum siamense; identical to SEQ ID NO: 3744
  source 1..36: mol_type = other DNA

SEQ ID NO: 3746 - DNA, 36 bp, Colletotrichum siamense
  source 1..36: mol_type = other DNA
gcgcttccagcaaggctggccgggcttcatgcacca

SEQ ID NO: 3747 - DNA, 36 bp, Colletotrichum siamense
  source 1..36: mol_type = other DNA
acgcttccagcatggctgtccgggcttggtacacca

SEQ ID NO: 3748 - DNA, 36 bp, Colletotrichum siamense
  source 1..36: mol_type = other DNA
tggtgcaccaagcccggtcagccctgctggaaacgc

SEQ ID NO: 3749 - DNA, 39 bp, Colletotrichum tanaceti
  source 1..39: mol_type = other DNA
tggtgccgcactgtcggccagccctgctggaaggagaag

SEQ ID NO: 3750 - DNA, 42 bp, Colletotrichum tanaceti
  source 1..42: mol_type = other DNA
tggtgccgcaccgtcggccagccctgctggaaggtgaagcgc

SEQ ID NO: 3751 - DNA, 42 bp, Colletotrichum tanaceti
  source 1..42: mol_type = other DNA
tggtgcagccagccgggggcgccgtgctccgtcgctaagcga

SEQ ID NO: 3752 - DNA, 36 bp, Colletotrichum tropicale
  source 1..36: mol_type = other DNA
tggtgcacaaagcccggacaaccatgctggaagcgt

SEQ ID NO: 3753 - DNA, 36 bp, Colletotrichum viniferum
  source 1..36: mol_type = other DNA
gcgtttccagcagggctggccgggctcggtgcacca

SEQ ID NO: 3754 - DNA, 36 bp, Colletotrichum viniferum; identical to SEQ ID NO: 3744
  source 1..36: mol_type = other DNA

SEQ ID NO: 3755 - DNA, 42 bp, Coniella lustricola
  source 1..42: mol_type = other DNA
tggtgcctcttccacggtgaagggtgctggaaggagaagcgc

SEQ ID NO: 3756 - DNA, 33 bp, Coniella lustricola
  source 1..33: mol_type = other DNA
tggtgcctcttccacggtgaagggtgctggaag

SEQ ID NO: 3757 - DNA, 33 bp, Coniella lustricola
  source 1..33: mol_type = other DNA
tggtgcctcttccacggtgagggctgctggaag

SEQ ID NO: 3758 - DNA, 42 bp, Coniochaeta ligniaria
  source 1..42: mol_type = other DNA
tggtgcaacatccgaggcgagccctgctggaagtccaagcgc

SEQ ID NO: 3759 - DNA, 24 bp, Coniochaeta pulveracea
  source 1..24: mol_type = other DNA
acgcttagatttccagcaaggtga

SEQ ID NO: 3760 - DNA, 42 bp, Coniochaeta pulveracea
  source 1..42: mol_type = other DNA
acgcttcgacttccaacatggctggcccttaaaggggcacca

SEQ ID NO: 3761 - DNA, 42 bp, Coniochaeta pulveracea
  source 1..42: mol_type = other DNA
ccgcttgttcttccagcatggctggcccttgtgggggcacca

SEQ ID NO: 3762 - DNA, 42 bp, Coniochaeta pulveracea
  source 1..42: mol_type = other DNA
gcgcttggatttccagcatggctcgccggggtgggggcacca

SEQ ID NO: 3763 - DNA, 42 bp, Coniochaeta pulveracea
  source 1..42: mol_type = other DNA
acgcttgttcttccagcatggctgacccgggtgggggcacca

SEQ ID NO: 3764 - DNA, 42 bp, Coniochaeta pulveracea
  source 1..42: mol_type = other DNA
acgcttgctcttccagcatggttggccgggatgggggcacca

SEQ ID NO: 3765 - DNA, 42 bp, Coniochaeta pulveracea
  source 1..42: mol_type = other DNA
ccgcttgttcttccagcacggctgacccttgtagggacacca

SEQ ID NO: 3766 - DNA, 42 bp, Coniochaeta pulveracea
  source 1..42: mol_type = other DNA
gcgcttcgacttccagcatggctgaccacggagtctgcacca

SEQ ID NO: 3767 - DNA, 42 bp, Coniochaeta sp.
  source 1..42: mol_type = other DNA; note = 2T2.1
gcgcttgctcttcttccagcacggctcgcccttggtggtgca

SEQ ID NO: 3768 - DNA, 39 bp, Coniochaeta sp.
  source 1..39: mol_type = other DNA; note = 2T2.1
gcgcttgttcttccagcagggctcgcccttggtggtgca

SEQ ID NO: 3769 - DNA, 42 bp, Coniochaeta sp.
  source 1..42: mol_type = other DNA; note = 2T2.1
gcgcttgttcttccagcacggctcgcccttgacggaacacca

SEQ ID NO: 3770 - DNA, 42 bp, Coniochaeta sp.
  source 1..42: mol_type = other DNA; note = 2T2.1
gcgcttggacttccagcacggctcgcccttgacggaacacca

SEQ ID NO: 3771 - DNA, 42 bp, Coniochaeta sp.
  source 1..42: mol_type = other DNA; note = 2T2.1
gcgcctgctcttccagcacggctcgcccttgacggaacacca

SEQ ID NO: 3772 - DNA, 39 bp, Coniochaeta sp.
  source 1..39: mol_type = other DNA; note = 2T2.1
tgcaccacgaaggtcgagccctgctggaagaacaagcga

SEQ ID NO: 3773 - DNA, 42 bp, Coniochaeta sp.
  source 1..42: mol_type = other DNA; note = 2T2.1
tggtgctccgtaaagggcgagccgtgctggaagtcgaagcgc

SEQ ID NO: 3774 - DNA, 42 bp, Coniochaeta sp.
  source 1..42: mol_type = other DNA; note = 2T2.1
tggtgttccgtcaagggcgagccatgctacaagcacaagcga

SEQ ID NO: 3775 - DNA, 42 bp, Coniochaeta sp.
  source 1..42: mol_type = other DNA; note = 2T2.1
tggtgctccgtcaagggcgagccgtgctacaagaacaaacgc

SEQ ID NO: 3776 - DNA, 42 bp, Coniochaeta sp.
  source 1..42: mol_type = other DNA; note = 2T2.1
tggtgctccgtcaagggcgagccctgctacaagtccaagcgc

SEQ ID NO: 3777 - DNA, 39 bp, Coniosporium apollinis
  source 1..39: mol_type = other DNA
acgcttggccttgtggcagggcttgtttggtgctccaca

SEQ ID NO: 3778 - DNA, 42 bp, Coniosporium apollinis
  source 1..42: mol_type = other DNA
gcgctttagcttgtcgcaggcctggttcggctgccagcagat

SEQ ID NO: 3779 - DNA, 54 bp, Coniosporium apollinis
  source 1..54: mol_type = other DNA
gcgcttcagccgagggcaaccttggcctgtcttgtggcagaaacgggagcccca

SEQ ID NO: 3780 - DNA, 54 bp, Coniosporium apollinis
  source 1..54: mol_type = other DNA
gcgcttcaccctaggacaaccttggcctgtcttgtggcagaagcgggagcccca

SEQ ID NO: 3781 - DNA, 30 bp, Cordyceps fumosorosea
  source 1..30: mol_type = other DNA
cttccagcacggctgcgcggggcggaagca

SEQ ID NO: 3782 - DNA, 33 bp, Cordyceps fumosorosea
  source 1..33: mol_type = other DNA
cttccagcacggctgcgcggggcggaagcacca

SEQ ID NO: 3783 - DNA, 33 bp, Cordyceps fumosorosea
  source 1..33: mol_type = other DNA
cttccagcagggctgcgcggggcggaagcacca

SEQ ID NO: 3784 - DNA, 42 bp, Cordyceps militaris
  source 1..42: mol_type = other DNA
gcgcttggccttccagcaaggctggccaggtctcaggcacca

SEQ ID NO: 3785 - DNA, 36 bp, Cordyceps militaris
  source 1..36: mol_type = other DNA
gcgcttccagcaaggctcgccaggtctcgtgcacca

SEQ ID NO: 3786 - DNA, 42 bp, Cordyceps militaris
  source 1..42: mol_type = other DNA
gcgcttgagcttccagcacggctggccgggtctcgtgcacca

SEQ ID NO: 3787 - DNA, 42 bp, Cryomyces minteri
  source 1..42: mol_type = other DNA
gcgcttggccttggagcaaccctgaccagggagatggcagaa

SEQ ID NO: 3788 - DNA, 42 bp, Cryomyces minteri
  source 1..42: mol_type = other DNA
acgcttgaccttggaacagccctggcctgggagatggcagaa

SEQ ID NO: 3789 - DNA, 45 bp, Cryphonectria parasitica
  source 1..45: mol_type = other DNA
gcgcttggaggcgtagcaggtgctggagccctcgaaggggcagaa

SEQ ID NO: 3790 - DNA, 42 bp, Cryphonectria parasitica
  source 1..42: mol_type = other DNA
acgcttctccttccagcaaccttcgccgtggaagaggcacca

SEQ ID NO: 3791 - DNA, 36 bp, Cryphonectria parasitica
  source 1..36: mol_type = other DNA
acgcttccaacagccctcgccgtggaagaggcacca

SEQ ID NO: 3792 - DNA, 33 bp, Cryphonectria parasitica
  source 1..33: mol_type = other DNA
cttccaacagccctcgccgtggaagaggcacca

SEQ ID NO: 3793 - DNA, 42 bp, Cytospora leucostoma
  source 1..42: mol_type = other DNA
tcgtgcgagcagcccggcgaggcgtgcttcaaggcgcgccgc

SEQ ID NO: 3794 - DNA, 33 bp, Cytospora leucostoma
  source 1..33: mol_type = other DNA
tggtgcctcctcaagggccagggctgttggaag

SEQ ID NO: 3795 - DNA, 39 bp, Delitschia confertaspora
  source 1..39: mol_type = other DNA
gcgcttaagcttctggcaagtggcatggccgaaggtgca

SEQ ID NO: 3796 - DNA, 30 bp, Delitschia confertaspora
  source 1..30: mol_type = other DNA
agagcaagactggccggggaagcggcagtt

SEQ ID NO: 3797 - DNA, 42 bp, Delitschia confertaspora
  source 1..42: mol_type = other DNA
acgcttctccttggagcaagactgtcccgggaagcggcagtt

SEQ ID NO: 3798 - DNA, 39 bp, Diaporthe ampelina
  source 1..39: mol_type = other DNA
tgcgagcagcccggcgaggcgtgccacaaggcccgctcc

SEQ ID NO: 3799 - DNA, 51 bp, Diaporthe ampelina
  source 1..51: mol_type = other DNA
ttttgccccttcggcggcgaggccggcagcgtgtgctacgcgtccaagcgc

SEQ ID NO: 3800 - DNA, 33 bp, Diaporthe ampelina
  source 1..33: mol_type = other DNA
tggtgcttctggaaaggccagggctgctggaag

SEQ ID NO: 3801 - DNA, 36 bp, Diaporthe ampelina
  source 1..36: mol_type = other DNA
tggtgcttctggaaaggccagggctgctggaagcgc

SEQ ID NO: 3802 - DNA, 36 bp, Diaporthe helianthi
  source 1..36: mol_type = other DNA
gcgggccttgttacaggcctcaccgggctcctcgca

SEQ ID NO: 3803 - DNA, 51 bp, Diaporthe helianthi
  source 1..51: mol_type = other DNA
ccgcttggaggcgtagcacacggagccggcctcgccgccaaaggggcagaa

SEQ ID NO: 3804 - DNA, 42 bp, Diaporthe helianthi
  source 1..42: mol_type = other DNA
acgcttggccttccagcagccctcgcccttccagaagcacca

SEQ ID NO: 3805 - DNA, 36 bp, Diaporthe helianthi
  source 1..36: mol_type = other DNA
acgcttccagcagccctcacccttccagaagcacca

SEQ ID NO: 3806 - DNA, 39 bp, Diplocarpon rosae
  source 1..39: mol_type = other DNA
tgcggacacccaggacagccatgtggcaaggctaagcgc

SEQ ID NO: 3807 - DNA, 39 bp, Diplocarpon rosae
  source 1..39: mol_type = other DNA
tgcggccaccccggtcagccatgcggcaaagtcaagcgc

SEQ ID NO: 3808 - DNA, 60 bp, Diplocarpon rosae
  source 1..60: mol_type = other DNA
tggactacgctcgatgcacgatgcaacctcgttggaggtgcatgctacgaggccaagcgt

SEQ ID NO: 3809 - DNA, 39 bp, Diplocarpon rosae
  source 1..39: mol_type = other DNA
tgcggacacccaggacaaccttgcggcaaggccaagcgt

SEQ ID NO: 3810 - DNA, 39 bp, Diplodia corticola
  source 1..39: mol_type = other DNA
tgctccggccctgccgacctttgcaccatggccaagcgc

SEQ ID NO: 3811 - DNA, 36 bp, Diplodia corticola
  source 1..36: mol_type = other DNA
ttctgcggccgtatcaggggccagccatgccacaag

SEQ ID NO: 3812 - DNA, 45 bp, Diplodia corticola
  source 1..45: mol_type = other DNA
ttctgcggccgtatcaggggccagccatgccacaagctcaagcgt

SEQ ID NO: 3813 - DNA, 33 bp, Dothistroma septosporum
  source 1..33: mol_type = other DNA
tgcactgcaccaggcattgcctgcgccaaacgt

SEQ ID NO: 3814 - DNA, 33 bp, Dothistroma septosporum
  source 1..33: mol_type = other DNA
tgcactgcaccaggcattgcatgcggcaaacgt

SEQ ID NO: 3815 - DNA, 33 bp, Dothistroma septosporum
  source 1..33: mol_type = other DNA
tgcacagtcccaggtcttgcttgcggtaagcga

SEQ ID NO: 3816 - DNA, 42 bp, Dothistroma septosporum
  source 1..42: mol_type = other DNA
ttctgcggtctccccggagaagcttgctctcgcgccaagcgt

SEQ ID NO: 3817 - DNA, 36 bp, Dothistroma septosporum
  source 1..36: mol_type = other DNA
cgctgcagtgctcccggcattggctgcgagaagcgc

SEQ ID NO: 3818 - DNA, 36 bp, Dothistroma septosporum
  source 1..36: mol_type = other DNA
agatgcactgttcctggtcttgcctgcggaaagcga

SEQ ID NO: 3819 - DNA, 33 bp, Drechmeria coniospora
  source 1..33: mol_type = other DNA
tggtgcacccgtcccggaagcggatgctggaag

SEQ ID NO: 3820 - DNA, 39 bp, Drechmeria coniospora
  source 1..39: mol_type = other DNA
tggtgcacccgtcccggaagcggatgctggaagaaacgc

SEQ ID NO: 3821 - DNA, 33 bp, Drechmeria coniospora; identical to SEQ ID NO: 3819
  source 1..33: mol_type = other DNA

SEQ ID NO: 3822 - DNA, 33 bp, Drechmeria coniospora
  source 1..33: mol_type = other DNA
cttccagcatccgcttccgggacgggtgcacca

SEQ ID NO: 3823 - DNA, 33 bp, Drechmeria coniospora
  source 1..33: mol_type = other DNA
cttccagcaaccacttccggggcgagtgcacca

SEQ ID NO: 3824 - DNA, 42 bp, Drechmeria coniospora
  source 1..42: mol_type = other DNA
ccgcttcaccttccagcagccgctgccgggacgagtgcacca

SEQ ID NO: 3825 - DNA, 39 bp, Drepanopeziza brunnea
  source 1..39: mol_type = other DNA
tgcggataccgcggacaaccttgccctaaggccaagcgc

SEQ ID NO: 3826 - DNA, 27 bp, Escovopsis weberi
  source 1..27: mol_type = other DNA
tgggccgtcgcctacaagagcaagcgc

SEQ ID NO: 3827 - DNA, 42 bp, Escovopsis weberi
  source 1..42: mol_type = other DNA
tggtgcatctaccccggccagggctgctggaaggccaagcgc

SEQ ID NO: 3828 - DNA, 42 bp, Escovopsis weberi
  source 1..42: mol_type = other DNA
tggtgcatgaaccccggccagggatgctggaaggtcaagcgc

SEQ ID NO: 3829 - DNA, 33 bp, Escovopsis weberi
  source 1..33: mol_type = other DNA
tggtgcaccaaccccggccagggctgctggaag

SEQ ID NO: 3830 - DNA, 42 bp, Escovopsis weberi
  source 1..42: mol_type = other DNA
tggtgcaccaaccccggccagggctgctggaagaagaagcgc

SEQ ID NO: 3831 - DNA, 33 bp, Escovopsis weberi
  source 1..33: mol_type = other DNA
tggtgcaccaacccgggccagggctgctggaag

SEQ ID NO: 3832 - DNA, 36 bp, Escovopsis weberi
  source 1..36: mol_type = other DNA
tggtgcaccaaccccggccagggctgctggaagcgt

SEQ ID NO: 3833 - DNA, 33 bp, Gaeumannomyces tritici
  source 1..33: mol_type = other DNA
gcgcttccagcagctctggccgcggtactggca

SEQ ID NO: 3834 - DNA, 42 bp, Gaeumannomyces tritici
  source 1..42: mol_type = other DNA
gcgcttggtcttcttccagcagggctggccgcggtacgtgca

SEQ ID NO: 3835 - DNA, 42 bp, Gaeumannomyces tritici
  source 1..42: mol_type = other DNA
ccgcttgacctgccagcagccctggccctcggcgccgcagaa

SEQ ID NO: 3836 - DNA, 36 bp, Gaeumannomyces tritici
  source 1..36: mol_type = other DNA
gcgcttccagcacgactggccgcggaaccggcagcc

SEQ ID NO: 3837 - DNA, 36 bp, Gaeumannomyces tritici
  source 1..36: mol_type = other DNA
gcgcttccagcaggactggccgcggtggcggcagcc

SEQ ID NO: 3838 - DNA, 36 bp, Gaeumannomyces tritici
  source 1..36: mol_type = other DNA
gcgcttccagcagctctggccgcggttgcggcagcc

SEQ ID NO: 3839 - DNA, 36 bp, Gaeumannomyces tritici
  source 1..36: mol_type = other DNA
gcgcttccagcagctctggccgcggtaccggcagcc

SEQ ID NO: 3840 - DNA, 42 bp, Gaeumannomyces tritici
  source 1..42: mol_type = other DNA
gcgcttggccacggcgcaggcgttaccggcctcgtggcacca

SEQ ID NO: 3841 - DNA, 21 bp, Glarea lozoyensis
  source 1..21: mol_type = other DNA
cggctgtccatgtcgaataca

SEQ ID NO: 3842 - DNA, 18 bp, Glarea lozoyensis
  source 1..18: mol_type = other DNA
ttgtccatgacgctggca

SEQ ID NO: 3843 - DNA, 21 bp, Glarea lozoyensis
  source 1..21: mol_type = other DNA
ttgtccatgacgctggcattg

SEQ ID NO: 3844 - DNA, 21 bp, Glarea lozoyensis
  source 1..21: mol_type = other DNA
cggctgtccatgtcgaataca

SEQ ID NO: 3845 - DNA, 15 bp, Glarea lozoyensis
  source 1..15: mol_type = other DNA
gccgtgccgttggca

SEQ ID NO: 3846 - DNA, 21 bp, Glarea lozoyensis
  source 1..21: mol_type = other DNA
ttgtccatgacgctggcattg

SEQ ID NO: 3847 - DNA, 33 bp, Glonium stellatum
  source 1..33: mol_type = other DNA
gctgaaccaaacgccgttaccaaactcaagcga

SEQ ID NO: 3848 - DNA, 27 bp, Glonium stellatum
  source 1..27: mol_type = other DNA
tgccatctcccgggccaatcttgccct

SEQ ID NO: 3849 - DNA, 42 bp, Grosmannia clavigera
  source 1..42: mol_type = other DNA
gcgcttcaccttccagcaggcctggccgtaccactggcacca

SEQ ID NO: 3850 - DNA, 36 bp, Grosmannia clavigera
  source 1..36: mol_type = other DNA
gcgcttccagcagccctggccgtaccactggcacca

SEQ ID NO: 3851 - DNA, 39 bp, Helotiales sp.
  source 1..39: mol_type = other DNA; note = DMI-Dod-QoI
acgcttggccttgccacacggctgtcccgggtaaccaca

SEQ ID NO: 3852 - DNA, 39 bp, Helotiales sp.
  source 1..39: mol_type = other DNA; note = DMI-Dod-QoI
tctctttagcttgccacatggctggcctgggtatccgca

SEQ ID NO: 3853 - DNA, 39 bp, Helotiales sp.
  source 1..39: mol_type = other DNA; note = DMI-Dod-QoI
acgcttgactttgccgcaaggttggccggggtatccgca

SEQ ID NO: 3854 - DNA, 39 bp, Hyaloscypha bicolor E
  source 1..39: mol_type = other DNA
tgcggagcgagaggacaaccttgtggcaaggccaagaga

SEQ ID NO: 3855 - DNA, 39 bp, Hyaloscypha bicolor E
  source 1..39: mol_type = other DNA
tgtggagctcgaggacaaccttgcggcaaagtcaagcgt

SEQ ID NO: 3856 - DNA, 57 bp, Hyaloscypha hepaticicola
  source 1..57: mol_type = other DNA
tgggataatgattggggttgtggagagcgtggacaaccttgcggcaaagtcaagcgc

SEQ ID NO: 3857 - DNA, 51 bp, Hyaloscypha hepaticicola
  source 1..51: mol_type = other DNA
tgggattggggatgtggagagagaggtcaaccttgtggcaaagccaagaga

SEQ ID NO: 3858 - DNA, 45 bp, Hyaloscypha hepaticicola
  source 1..45: mol_type = other DNA
tggggatggggagagcgaggccagccttgcggaaaagcgaagcgt

SEQ ID NO: 3859 - DNA, 39 bp, Lachnellula hyalina
  source 1..39: mol_type = other DNA
gcgcttctccttccagcagccttgtccacgagctccaca

SEQ ID NO: 3860 - DNA, 39 bp, Lachnellula hyalina
  source 1..39: mol_type = other DNA
gcgcttgattttccagcagccttggccgcgggcaccgca

SEQ ID NO: 3861 - DNA, 39 bp, Lachnellula hyalina
  source 1..39: mol_type = other DNA
gcgcttttgcttccagcagccttgaccacgggcaccaca

SEQ ID NO: 3862 - DNA, 39 bp, Lachnellula hyalina
  source 1..39: mol_type = other DNA
gcgcttaaccttccagcatccctggcctcgtgctccaca

SEQ ID NO: 3863 - DNA, 42 bp, Lachnellula hyalina
  source 1..42: mol_type = other DNA
gcgcttgattttccagcagccttggccgcgggcaccgcaacc

SEQ ID NO: 3864 - DNA, 36 bp, Lachnellula occidentalis
  source 1..36: mol_type = other DNA
tctcttctttgggcatccttggcctcgggcaccgca

SEQ ID NO: 3865 - DNA, 39 bp, Lachnellula occidentalis
  source 1..39: mol_type = other DNA
acgcttctccttccagcaaccttgaccacgggcaccgca

SEQ ID NO: 3866 - DNA, 39 bp, Lachnellula occidentalis
  source 1..39: mol_type = other DNA
gcgcttgaccttccagcatccctggcctcgtgctccgca

SEQ ID NO: 3867 - DNA, 39 bp, Lachnellula subtilissima
  source 1..39: mol_type = other DNA
acgcttctccttccagcagccttgtccacgagctccgca

SEQ ID NO: 3868 - DNA, 39 bp, Lachnellula subtilissima
  source 1..39: mol_type = other DNA
tcgcttgatcttccagcatccctgtcctcgtgctccgca

SEQ ID NO: 3869 - DNA, 39 bp, Lachnellula subtilissima; identical to SEQ ID NO: 3862
  source 1..39: mol_type = other DNA

SEQ ID NO: 3870 - DNA, 18 bp, Lachnellula subtilissima
  source 1..18: mol_type = other DNA
gcgcttgattttccaaca

SEQ ID NO: 3871 - DNA, 39 bp, Lachnellula suecica
  source 1..39: mol_type = other DNA
tgtggagcgcgcggacagggctgctacaaggcgaagaga

SEQ ID NO: 3872 - DNA, 39 bp, Lachnellula suecica
  source 1..39: mol_type = other DNA
tgcggtgctcggggccagggttgctacaaggagaagcgt

SEQ ID NO: 3873 - DNA, 39 bp, Lachnellula suecica
  source 1..39: mol_type = other DNA
tgcggagccagaggccagggatgctacaagaacaagaga

SEQ ID NO: 3874 - DNA, 42 bp, Lachnellula suecica
  source 1..42: mol_type = other DNA
ggctgcggtgccagaggccaaggctgctacaagatcaagcgc

SEQ ID NO: 3875 - DNA, 39 bp, Lachnellula willkommii
  source 1..39: mol_type = other DNA
gcgcttctccttccagcaaccttgaccacgggcaccgca

SEQ ID NO: 3876 - DNA, 39 bp, Lachnellula willkommii
  source 1..39: mol_type = other DNA
acgcttgatcttccagcagccctgtcctcgtgctccgca

SEQ ID NO: 3877 - DNA, 39 bp, Lachnellula willkommii; identical to SEQ ID NO: 3862
  source 1..39: mol_type = other DNA

SEQ ID NO: 3878 - DNA, 42 bp, Lachnellula willkommii; identical to SEQ ID NO: 3863
  source 1..42: mol_type = other DNA

SEQ ID NO: 3879 - DNA, 42 bp, Lasallia pustulata
  source 1..42: mol_type = other DNA
acgcttagccttagagcagatctcgcccgggcggtaacagaa

SEQ ID NO: 3880 - DNA, 42 bp, Lasallia pustulata
  source 1..42: mol_type = other DNA
gcgcttgagcttggagcagatctcaccagggcgatagcagaa

SEQ ID NO: 3881 - DNA, 42 bp, Lasallia pustulata
  source 1..42: mol_type = other DNA
gcgcttggtcttggagcaaatctcgccggggcggtagcagaa

SEQ ID NO: 3882 - DNA, 42 bp, Lasallia pustulata
  source 1..42: mol_type = other DNA
gcgcttggccttggagcagatctcgccggggcggtagcagaa

SEQ ID NO: 3883 - DNA, 42 bp, Lasallia pustulata; identical to SEQ ID NO: 3880
  source 1..42: mol_type = other DNA

SEQ ID NO: 3884 - DNA, 42 bp, Lasallia pustulata; identical to SEQ ID NO: 3881
  source 1..42: mol_type = other DNA

SEQ ID NO: 3885 - DNA, 42 bp, Lasallia pustulata
  source 1..42: mol_type = other DNA
acgcttggccttggagcagatctcgccccggcggtaacagaa

SEQ ID NO: 3886 - DNA, 39 bp, Lasiodiplodia theobromae
  source 1..39: mol_type = other DNA
acgcttggccatggtgcagaggtcggcagggccggagca

SEQ ID NO: 3887 - DNA, 42 bp, Lasiodiplodia theobromae
  source 1..42: mol_type = other DNA
acgcttcttgtgacagggctgaccgcggatgcggccacagaa

SEQ ID NO: 3888 - DNA, 45 bp, Lasiodiplodia theobromae
  source 1..45: mol_type = other DNA
acgcttgagcttgtggcagggctggccgcggatacgaccgcaaaa

SEQ ID NO: 3889 - DNA, 39 bp, Lasiodiplodia theobromae; identical to SEQ ID NO: 3886
  source 1..39: mol_type = other DNA

SEQ ID NO: 3890 - DNA, 42 bp, Lasiodiplodia theobromae; identical to SEQ ID NO: 3887
  source 1..42: mol_type = other DNA

SEQ ID NO: 3891 - DNA, 45 bp, Lasiodiplodia theobromae; identical to SEQ ID NO: 3888
  source 1..45: mol_type = other DNA

SEQ ID NO: 3892 - DNA, 39 bp, Letharia columbiana
  source 1..39: mol_type = other DNA
tgtcacgcccctggagcgccctgctcgaaagccaagcgt

SEQ ID NO: 3893 - DNA, 42 bp, Letharia columbiana
  source 1..42: mol_type = other DNA
ttctgctgggaagcaggagaaccctgctccaaactcaagcgc

SEQ ID NO: 3894 - DNA, 42 bp, Letharia columbiana
  source 1..42: mol_type = other DNA
ttctgttacctcgctggtgagccgtgctcgaaagccaaacgt

SEQ ID NO: 3895 - DNA, 51 bp, Letharia columbiana
  source 1..51: mol_type = other DNA
tggcacggacactgttaccgggacgaccaaccatgctccaagctgaagcgt

SEQ ID NO: 3896 - DNA, 51 bp, Letharia columbiana
  source 1..51: mol_type = other DNA
tggcatggatcctgctggcctgccggagaaccctgttccaagcaaaagcgt

SEQ ID NO: 3897 - DNA, 39 bp, Lindgomyces ingoldianus
  source 1..39: mol_type = other DNA
gcgcttaatcttctcgcaaatctcgtcaccaaatgcaca

SEQ ID NO: 3898 - DNA, 39 bp, Lindgomyces ingoldianus
  source 1..39: mol_type = other DNA
acgcttagccttagagcagggctggccgacgagcctgca

SEQ ID NO: 3899 - DNA, 39 bp, Lindgomyces ingoldianus
  source 1..39: mol_type = other DNA
acgcttttgcttggagcaaggctgtccgactagacggca

SEQ ID NO: 3900 - DNA, 33 bp, Lindgomyces ingoldianus
  source 1..33: mol_type = other DNA
acgcttggagcatggctgaccaacaagacggca

SEQ ID NO: 3901 - DNA, 36 bp, Lindgomyces ingoldianus
  source 1..36: mol_type = other DNA
acgcttggagcatggctgaccaacaagacggcaacg

SEQ ID NO: 3902 - DNA, 42 bp, Lindgomyces ingoldianus
  source 1..42: mol_type = other DNA
acgcttgagacggtcacacggctggccgggcatgccgcacga

SEQ ID NO: 3903 - DNA, 42 bp, Lineolata rhizophorae
  source 1..42: mol_type = other DNA
ttctgccatctgcccggtcagagctgctccaaggctaagcgt

SEQ ID NO: 3904 - DNA, 42 bp, Lineolata rhizophorae
  source 1..42: mol_type = other DNA
ttctgccaccttccgggccagagctgctccaaagagaagcgt

SEQ ID NO: 3905 - DNA, 42 bp, Lineolata rhizophorae
  source 1..42: mol_type = other DNA
ttttgccatctccccggtcagagttgctccaagacccgccgc

SEQ ID NO: 3906 - DNA, 42 bp, Lineolata rhizophorae
  source 1..42: mol_type = other DNA
ttctgccatcttccgggccaaagctgctccaaggttaagcgt

SEQ ID NO: 3907 - DNA, 45 bp, Lineolata rhizophorae
  source 1..45: mol_type = other DNA
tactgccacttgcctgggcaaagctgttccgagaaggagaagcgt

SEQ ID NO: 3908 - DNA, 42 bp, Lophiostoma macrostomum
  source 1..42: mol_type = other DNA
acgcttcgccttgccacagggctgtccacggtagtggcagaa

SEQ ID NO: 3909 - DNA, 39 bp, Lophiotrema nucula
  source 1..39: mol_type = other DNA
tgtggcatgccaggccagccatgtgaccgtctcaagcgt

SEQ ID NO: 3910 - DNA, 39 bp, Lophiotrema nucula
  source 1..39: mol_type = other DNA
tgcctgttcgtcggccagtcctgctctgtcgccaagcgt

SEQ ID NO: 3911 - DNA, 39 bp, Lophiotrema nucula
  source 1..39: mol_type = other DNA
tgtcagttcagcgacgccacttgccagaagatcaagcgc

SEQ ID NO: 3912 - DNA, 39 bp, Lophiotrema nucula
  source 1..39: mol_type = other DNA
tgccgcttccccggccagccatgctccaaggagaagcgt

SEQ ID NO: 3913 - DNA, 36 bp, Lophiotrema nucula
  source 1..36: mol_type = other DNA
tgccgattcccgggccagccatgctccaagaagcgt

SEQ ID NO: 3914 - DNA, 39 bp, Lophium mytilinum
  source 1..39: mol_type = other DNA
acgcttgtccttgctgcaagactggcctgggagatggca

SEQ ID NO: 3915 - DNA, 39 bp, Lophium mytilinum
  source 1..39: mol_type = other DNA
acgcttttccttggagcaagattgaccggggagatggca

SEQ ID NO: 3916 - DNA, 39 bp, Lophium mytilinum
  source 1..39: mol_type = other DNA
acgcttggtcttgctgcaagattggccgggaagatggca

SEQ ID NO: 3917 - DNA, 45 bp, Lophium mytilinum
  source 1..45: mol_type = other DNA
gcgcttgtccttgctgcaagactggcccggaagatggcaacccca

SEQ ID NO: 3918 - DNA, 39 bp, Madurella mycetomatis
  source 1..39: mol_type = other DNA
atgtgcctccgctaccccggctcgccctgctggaagcgc

SEQ ID NO: 3919 - DNA, 42 bp, Madurella mycetomatis
  source 1..42: mol_type = other DNA
cgctgcgtcgccgagggcggatcctgctggattgccaagcgc

SEQ ID NO: 3920 - DNA, 39 bp, Madurella mycetomatis
  source 1..39: mol_type = other DNA
tggtgcctcggcttccccggccagccctgctggaagcgt

SEQ ID NO: 3921 - DNA, 39 bp, Madurella mycetomatis
  source 1..39: mol_type = other DNA
tggtgtctccgcttccccggacaaccctgctggaagcgc

SEQ ID NO: 3922 - DNA, 42 bp, Madurella mycetomatis
  source 1..42: mol_type = other DNA
tggtgctccaaccgtggccaggcctgcgataccgtcaagcgt

SEQ ID NO: 3923 - DNA, 33 bp, Madurella mycetomatis
  source 1..33: mol_type = other DNA
tggtgcaccggcttccccggtcagccctgctgg

SEQ ID NO: 3924 - DNA, 36 bp, Madurella mycetomatis
  source 1..36: mol_type = other DNA
tggtgcaccggtttccccggccagccctgctggaag

SEQ ID NO: 3925 - DNA, 42 bp, Madurella mycetomatis
  source 1..42: mol_type = other DNA
tggtgcacaggctttcccggccagccctgctggaagaagcgc

SEQ ID NO: 3926 - DNA, 33 bp, Madurella mycetomatis; identical to SEQ ID NO: 3923
  source 1..33: mol_type = other DNA

SEQ ID NO: 3927 - DNA, 33 bp, Madurella mycetomatis; identical to SEQ ID NO: 3923
  source 1..33: mol_type = other DNA

SEQ ID NO: 3928 - DNA, 39 bp, Marssonina coronariae
  source 1..39: mol_type = other DNA
acgcttagccttgccacatggctgtccgggttttccaca

SEQ ID NO: 3929 - DNA, 39 bp, Marssonina coronariae
  source 1..39: mol_type = other DNA
gcgcttgactttaccgcaaggctgtccgggttttccaca

SEQ ID NO: 3930 - DNA, 60 bp, Marssonina coronariae
  source 1..60: mol_type = other DNA
acgcttggcctcgtagcatgcacctccaacgaggttacatcgtgcatcgagtgtagccca

SEQ ID NO: 3931 - DNA, 27 bp, Massarina eburnea
  source 1..27: mol_type = other DNA
gcaaggctggccgacgaagcggcattt

SEQ ID NO: 3932 - DNA, 27 bp, Massarina eburnea
  source 1..27: mol_type = other DNA
gcagggctgaccaacaaagcggcattt

SEQ ID NO: 3933 - DNA, 36 bp, Massarina eburnea
  source 1..36: mol_type = other DNA
gtcacgcttgcatggctgaccaacgaagcggcaggt

SEQ ID NO: 3934 - DNA, 39 bp, Melanomma pulvis-pyrius
  source 1..39: mol_type = other DNA
tgccgcttccccggccagccttgctccaaggagaagcgt

SEQ ID NO: 3935 - DNA, 36 bp, Melanomma pulvis-pyrius
  source 1..36: mol_type = other DNA
tgccgcttcccaggccagccctgctccaagaagcgt

SEQ ID NO: 3936 - DNA, 39 bp, Melanomma pulvis-pyrius
  source 1..39: mol_type = other DNA
tgccgcttccccggccagccctgctccaagaacaagcgt

SEQ ID NO: 3937 - DNA, 30 bp, Melanomma pulvis-pyrius
  source 1..30: mol_type = other DNA
tgccgcttccccggccagccctgctccaag

SEQ ID NO: 3938 - DNA, 42 bp, Metarhizium acridum
  source 1..42: mol_type = other DNA
gtctgcaacggtcccaatatcttgtgctggaagaagaagcgt

SEQ ID NO: 3939 - DNA, 33 bp, Metarhizium acridum
  source 1..33: mol_type = other DNA
tggtgctggcagcctggccaaccttgctggaag

SEQ ID NO: 3940 - DNA, 42 bp, Metarhizium acridum
  source 1..42: mol_type = other DNA
tggtgctggcagcctggccaaccttgctggaaggtcaaaaga

SEQ ID NO: 3941 - DNA, 42 bp, Metarhizium acridum
  source 1..42: mol_type = other DNA
tggtgctggaggccaggtcagccatgctggaaagccaagcgt

SEQ ID NO: 3942 - DNA, 42 bp, Metarhizium acridum
  source 1..42: mol_type = other DNA
tggtgctaccggcctgggcaaccctgctggaaggccaagaga

SEQ ID NO: 3943 - DNA, 42 bp, Metarhizium album
  source 1..42: mol_type = other DNA
tggtgcaaccggcccggagagccctgctggaaagccaagaga

SEQ ID NO: 3944 - DNA, 42 bp, Metarhizium album
  source 1..42: mol_type = other DNA
tggtgctggcggccaggcgagccatgctggaaggccaagcgt

SEQ ID NO: 3945 - DNA, 42 bp, Metarhizium album
  source 1..42: mol_type = other DNA
tggtgctggcggcccggagagccctgctggaaggtcaagaga

SEQ ID NO: 3946 - DNA, 42 bp, Metarhizium album
  source 1..42: mol_type = other DNA
tggtgctggcggccgggcatgccttgctggaagagagacagc

SEQ ID NO: 3947 - DNA, 42 bp, Metarhizium anisopliae
  source 1..42: mol_type = other DNA
acgcttggccttccaacatggttgacctggcctccagcacca

SEQ ID NO: 3948 - DNA, 42 bp, Metarhizium anisopliae; identical to SEQ ID NO: 3947
  source 1..42: mol_type = other DNA

SEQ ID NO: 3949 - DNA, 42 bp, Metarhizium anisopliae; identical to SEQ ID NO: 3947
  source 1..42: mol_type = other DNA

SEQ ID NO: 3950 - DNA, 42 bp, Metarhizium anisopliae; identical to SEQ ID NO: 3947
  source 1..42: mol_type = other DNA

SEQ ID NO: 3951 - DNA, 42 bp, Metarhizium anisopliae
  source 1..42: mol_type = other DNA
cctcttggccttccagcagggctgtccgggtgcgctgcacca

SEQ ID NO: 3952 - DNA, 42 bp, Metarhizium anisopliae
  source 1..42: mol_type = other DNA
acgcttggccttccaacatggttgacccggcgcccagcacca

SEQ ID NO: 3953 - DNA, 42 bp, Metarhizium anisopliae
  source 1..42: mol_type = other DNA
acgcttgtctttccagcaaggctggccaggctgccagcacca

SEQ ID NO: 3954 - DNA, 42 bp, Metarhizium anisopliae
  source 1..42: mol_type = other DNA
tctcttgaccttccagcaaggttggccaggtcgccagcacca

SEQ ID NO: 3955 - DNA, 42 bp, Metarhizium anisopliae; identical to SEQ ID NO: 3951
  source 1..42: mol_type = other DNA

SEQ ID NO: 3956 - DNA, 42 bp, Metarhizium anisopliae; identical to SEQ ID NO: 3952
  source 1..42: mol_type = other DNA

SEQ ID NO: 3957 - DNA, 42 bp, Metarhizium anisopliae; identical to SEQ ID NO: 3953
  source 1..42: mol_type = other DNA

SEQ ID NO: 3958 - DNA, 42 bp, Metarhizium anisopliae; identical to SEQ ID NO: 3954
  source 1..42: mol_type = other DNA

SEQ ID NO: 3959 - DNA, 42 bp, Metarhizium anisopliae
  source 1..42: mol_type = other DNA
tggtgcggcgcacccggagagccctgctggaaggccaagagg

SEQ ID NO: 3960 - DNA, 42 bp, Metarhizium anisopliae
  source 1..42: mol_type = other DNA
tggtgcggcggtccgggagagccctgctggaaagacaagcgt

SEQ ID NO: 3961 - DNA, 42 bp, Metarhizium anisopliae
  source 1..42: mol_type = other DNA
tggtgcggcagtccgggagaaccctgctggaaagacaagaga

SEQ ID NO: 3962 - DNA, 42 bp, Metarhizium anisopliae
  source 1..42: mol_type = other DNA
tggtgctgggcgccgggtcaaccatgttggaaggccaagcgt

SEQ ID NO: 3963 - DNA, 42 bp, Metarhizium anisopliae
  source 1..42: mol_type = other DNA
tggtgctggcggcctggccaaccttgctggaaggtcaagaga

SEQ ID NO: 3964 - DNA, 42 bp, Metarhizium anisopliae; identical to SEQ ID NO: 3959
  source 1..42: mol_type = other DNA

SEQ ID NO: 3965 - DNA, 42 bp, Metarhizium anisopliae; identical to SEQ ID NO: 3960
  source 1..42: mol_type = other DNA

SEQ ID NO: 3966 - DNA, 42 bp, Metarhizium anisopliae; identical to SEQ ID NO: 3961
  source 1..42: mol_type = other DNA

SEQ ID NO: 3967 - DNA, 42 bp, Metarhizium anisopliae; identical to SEQ ID NO: 3962
  source 1..42: mol_type = other DNA

SEQ ID NO: 3968 - DNA, 42 bp, Metarhizium anisopliae; identical to SEQ ID NO: 3963
  source 1..42: mol_type = other DNA

SEQ ID NO: 3969 - DNA, 42 bp, Metarhizium brunneum
  source 1..42: mol_type = other DNA
cctcttggccttccagcagggttgtccgggccggccgcacca

SEQ ID NO: 3970 - DNA, 42 bp, Metarhizium brunneum
  source 1..42: mol_type = other DNA
acgcttgtctttccagcagggttctccgggcgcggagcacca

SEQ ID NO: 3971 - DNA, 42 bp, Metarhizium brunneum
  source 1..42: mol_type = other DNA
tctcttgtctttccagcagggttctccgggcgaggagcacca

SEQ ID NO: 3972 - DNA, 42 bp, Metarhizium brunneum; identical to SEQ ID NO: 3947
  source 1..42: mol_type = other DNA

SEQ ID NO: 3973 - DNA, 42 bp, Metarhizium brunneum
  source 1..42: mol_type = other DNA
tctcttgaccttccagcaaggttggccaggccgccagcacca

SEQ ID NO: 3974 - DNA, 42 bp, Metarhizium brunneum
  source 1..42: mol_type = other DNA
tggtgcggccggcccggacaaccctgctggaaggccaagagg

SEQ ID NO: 3975 - DNA, 42 bp, Metarhizium brunneum
  source 1..42: mol_type = other DNA
tggtgctccgcgcccggagaaccctgctggaaagacaagcgt

SEQ ID NO: 3976 - DNA, 42 bp, Metarhizium brunneum
  source 1..42: mol_type = other DNA
tggtgctcctcgcccggagaaccctgctggaaagacaagaga

SEQ ID NO: 3977 - DNA, 42 bp, Metarhizium brunneum
  source 1..42: mol_type = other DNA
tggtgctggaggccaggtcaaccatgttggaaggccaagcgt

SEQ ID NO: 3978 - DNA, 42 bp, Metarhizium brunneum; identical to SEQ ID NO: 3963
  source 1..42: mol_type = other DNA

SEQ ID NO: 3979 - DNA, 42 bp, Metarhizium guizhouense
  source 1..42: mol_type = other DNA
tggtgcggcgcgccaggacaaccctgctggaaggccaagagg

SEQ ID NO: 3980 - DNA, 42 bp, Metarhizium guizhouense
  source 1..42: mol_type = other DNA
tggtgctggcagcctggccagccttgctggaaagacaagcgt

SEQ ID NO: 3981 - DNA, 42 bp, Metarhizium guizhouense
  source 1..42: mol_type = other DNA
tggtgctggaggccgggtcaaccatgttggaaggccaagcgt

SEQ ID NO: 3982 - DNA, 42 bp, Metarhizium guizhouense
  source 1..42: mol_type = other DNA
tggtgctggcgacctggccaaccttgctggaaggtcaagaga

SEQ ID NO: 3983 - DNA, 42 bp, Metarhizium majus; identical to SEQ ID NO: 3953
  source 1..42: mol_type = other DNA

SEQ ID NO: 3984 - DNA, 42 bp, Metarhizium majus
  source 1..42: mol_type = other DNA
acgcttggccttccaacatggttgacccggcctccagcacca

SEQ ID NO: 3985 - DNA, 42 bp, Metarhizium majus; identical to SEQ ID NO: 3954
  source 1..42: mol_type = other DNA

SEQ ID NO: 3986 - DNA, 42 bp, Metarhizium rileyi
  source 1..42: mol_type = other DNA
tctcttggccttccagcaatcatgtccaggccgctggcacca

SEQ ID NO: 3987 - DNA, 33 bp, Metarhizium rileyi
  source 1..33: mol_type = other DNA
cttccagcaaggctgtcctggtcgccagcacca

SEQ ID NO: 3988 - DNA, 33 bp, Metarhizium rileyi
  source 1..33: mol_type = other DNA
cttccagcaaggctgaccagggcgccagcacca

SEQ ID NO: 3989 - DNA, 33 bp, Metarhizium rileyi; identical to SEQ ID NO: 3987
  source 1..33: mol_type = other DNA

SEQ ID NO: 3990 - DNA, 42 bp, Metarhizium rileyi; identical to SEQ ID NO: 3986
  source 1..42: mol_type = other DNA

SEQ ID NO: 3991 - DNA, 33 bp, Metarhizium rileyi; identical to SEQ ID NO: 3987
  source 1..33: mol_type = other DNA

SEQ ID NO: 3992 - DNA, 33 bp, Metarhizium rileyi; identical to SEQ ID NO: 3988
  source 1..33: mol_type = other DNA

SEQ ID NO: 3993 - DNA, 33 bp, Metarhizium rileyi; identical to SEQ ID NO: 3987
  source 1..33: mol_type = other DNA

SEQ ID NO: 3994 - DNA, 42 bp, Metarhizium robertsii
  source 1..42: mol_type = other DNA
cctcttggccttccagcagggctgtccgggtgcgttgcacca

SEQ ID NO: 3995 - DNA, 42 bp, Metarhizium robertsii; identical to SEQ ID NO: 3953
  source 1..42: mol_type = other DNA

SEQ ID NO: 3996 - DNA, 42 bp, Metarhizium robertsii; identical to SEQ ID NO: 3984
  source 1..42: mol_type = other DNA

SEQ ID NO: 3997 - DNA, 42 bp, Metarhizium robertsii; identical to SEQ ID NO: 3954
  source 1..42: mol_type = other DNA

SEQ ID NO: 3998 - DNA, 42 bp, Metarhizium robertsii
  source 1..42: mol_type = other DNA
tggtgcaacgcacccggacagccctgctggaaggccaagagg

SEQ ID NO: 3999 - DNA, 42 bp, Metarhizium robertsii; identical to SEQ ID NO: 3980
  source 1..42: mol_type = other DNA

SEQ ID NO: 4000 - DNA, 42 bp, Metarhizium robertsii; identical to SEQ ID NO: 3981
  source 1..42: mol_type = other DNA

SEQ ID NO: 4001 - DNA, 42 bp, Metarhizium robertsii; identical to SEQ ID NO: 3982
  source 1..42: mol_type = other DNA

SEQ ID NO: 4002 - DNA, 39 bp, Moelleriella libera
  source 1..39: mol_type = other DNA
tcttttcactttggcgaacagtccgtcggggtgccagca

SEQ ID NO: 4003 - DNA, 39 bp, Moelleriella libera
  source 1..39: mol_type = other DNA
ccgcttcaccatgcagaagaagccttggtctgcgcacca

SEQ ID NO: 4004 - DNA, 42 bp, Moelleriella libera
  source 1..42: mol_type = other DNA
acgctttgccttccagcatgtggcatatcgtcgcatgcacca

SEQ ID NO: 4005 - DNA, 39 bp, Mollisia scopiformis
  source 1..39: mol_type = other DNA
acgcttggcctttccacacggctgtcctgggtaaccgca

SEQ ID NO: 4006 - DNA, 39 bp, Mollisia scopiformis
  source 1..39: mol_type = other DNA
tctctttagcttgccacatggctgtcctgggtatccaca

SEQ ID NO: 4007 - DNA, 39 bp, Mollisia scopiformis
  source 1..39: mol_type = other DNA
acgcttgactttaccgcacggttggccggggtaaccaca

SEQ ID NO: 4008 - DNA, 39 bp, Monilinia fructicola
  source 1..39: mol_type = other DNA
tctcttggcctcgaagcaagcaccgccaaccatgttaca

SEQ ID NO: 4009 - DNA, 33 bp, Monilinia fructicola
  source 1..33: mol_type = other DNA
acgcttgcatccttgaccagggcgtccgcacca

SEQ ID NO: 4010 - DNA, 42 bp, Monilinia fructicola
  source 1..42: mol_type = other DNA
tctcttcgccttgcggcatccttgtccggggcgtccgcacca

SEQ ID NO: 4011 - DNA, 33 bp, Monilinia fructicola
  source 1..33: mol_type = other DNA
cttgcggcaaccttgtccagggcgtccacacca

SEQ ID NO: 4012 - DNA, 42 bp, Monilinia fructicola
  source 1..42: mol_type = other DNA
gcgcttggtcttgcggcaaccttgtccagggcgtccacacca

SEQ ID NO: 4013 - DNA, 39 bp, Monilinia fructigena
  source 1..39: mol_type = other DNA
tctcttagcctcgaagcaagcaccaccaaccatgttaca

SEQ ID NO: 4014 - DNA, 33 bp, Monilinia fructigena
  source 1..33: mol_type = other DNA
acgcttgcagccttgaccagggcgtccgcacca

SEQ ID NO: 4015 - DNA, 42 bp, Monilinia fructigena; identical to SEQ ID NO: 4010
  source 1..42: mol_type = other DNA

SEQ ID NO: 4016 - DNA, 42 bp, Monilinia fructigena
  source 1..42: mol_type = other DNA
acgcttggtcttgcggcaaccttgtccagggcgtccgcacca

SEQ ID NO: 4017 - DNA, 39 bp, Monilinia laxa
  source 1..39: mol_type = other DNA
tgtaacatggttggtggggcttgcttcgaggctaagaga

SEQ ID NO: 4018 - DNA, 33 bp, Monilinia laxa
  source 1..33: mol_type = other DNA
tggtgcggacgccccggacaaggatgcaagagg

SEQ ID NO: 4019 - DNA, 42 bp, Monilinia laxa
  source 1..42: mol_type = other DNA
tggtgcggacgccccggacaaggatgccgcaaggcgaagaga

SEQ ID NO: 4020 - DNA, 42 bp, Monilinia laxa
  source 1..42: mol_type = other DNA
tggtgcggacgccctggacaaggttgccgcaagaccaagcgt

SEQ ID NO: 4021 - DNA, 39 bp, Mytilinidion resinicola
  source 1..39: mol_type = other DNA
tgccatctaccaggacaatcttgcagcaaggacaagcgc

SEQ ID NO: 4022 - DNA, 45 bp, Mytilinidion resinicola
  source 1..45: mol_type = other DNA
tggggctgccatctaccaggacaatcttgcagcaaggacaagcgc

SEQ ID NO: 4023 - DNA, 45 bp, Mytilinidion resinicola
  source 1..45: mol_type = other DNA
tggggctgccacctcccgggtcagtcttgcagcaagaacaagcgt

SEQ ID NO: 4024 - DNA, 42 bp, Mytilinidion resinicola
  source 1..42: mol_type = other DNA
tactgccatctccctggccagtcttgtaacaaagacaaacgc

SEQ ID NO: 4025 - DNA, 42 bp, Mytilinidion resinicola
  source 1..42: mol_type = other DNA
tactgccatctccccggccaatcctgcagcaaagacaagcgc

SEQ ID NO: 4026 - DNA, 42 bp, Mytilinidion resinicola
  source 1..42: mol_type = other DNA
tactgccatcgccctggtcaatcttgcagcaaggagaagcgc

SEQ ID NO: 4027 - DNA, 39 bp, Neofusicoccum parvum
  source 1..39: mol_type = other DNA
acgcttgacctgataacatgcctcgccgggctcgttgca

SEQ ID NO: 4028 - DNA, 33 bp, Neofusicoccum parvum
  source 1..33: mol_type = other DNA
cttcgagcacggctggcccttccacctgcacca

SEQ ID NO: 4029 - DNA, 39 bp, Neofusicoccum parvum
  source 1..39: mol_type = other DNA
gcgcttcttcgagcacggctggcccttccacctgcacca

SEQ ID NO: 4030 - DNA, 33 bp, Neofusicoccum parvum; identical to SEQ ID NO: 4028
  source 1..33: mol_type = other DNA

SEQ ID NO: 4031 - DNA, 42 bp, Neonectria ditissima
  source 1..42: mol_type = other DNA
gcgcttggccttccagcacggctgtccgggatggatgcacca

SEQ ID NO: 4032 - DNA, 42 bp, Neonectria ditissima
  source 1..42: mol_type = other DNA
atcgcgcttcttccagcaaggctggccgggatggatgcacca

SEQ ID NO: 4033 - DNA, 39 bp, Neonectria ditissima
  source 1..39: mol_type = other DNA
gcgcttcttccagcagggctggccgggatacttgcacca

SEQ ID NO: 4034 - DNA, 42 bp, Neonectria ditissima
  source 1..42: mol_type = other DNA
gcgcttggccttccagcaaggctgaccggggtgcatgcacca

SEQ ID NO: 4035 - DNA, 42 bp, Neonectria ditissima
  source 1..42: mol_type = other DNA
gcgcttggccttccagcacggctggccgcggtgcatgcacca

SEQ ID NO: 4036 - DNA, 33 bp, Neurospora crassa
  source 1..33: mol_type = other DNA
cttccagcacgactggccgtggatccggcacca

SEQ ID NO: 4037 - DNA, 39 bp, Neurospora crassa
  source 1..39: mol_type = other DNA
acgcttcttccagcacgattggccgtggatgcggcacca

SEQ ID NO: 4038 - DNA, 36 bp, Neurospora crassa
  source 1..36: mol_type = other DNA
acgcttccagcacgactggccgtggatccggcacca

SEQ ID NO: 4039 - DNA, 42 bp, Neurospora crassa
  source 1..42: mol_type = other DNA
acgcttgaccttccagcaggactggccatggatccggcacca

SEQ ID NO: 4040 - DNA, 33 bp, Neurospora crassa; identical to SEQ ID NO: 4036
  source 1..33: mol_type = other DNA

SEQ ID NO: 4041 - DNA, 39 bp, Neurospora crassa; identical to SEQ ID NO: 4037
  source 1..39: mol_type = other DNA

SEQ ID NO: 4042 - DNA, 36 bp, Neurospora crassa; identical to SEQ ID NO: 4038
  source 1..36: mol_type = other DNA

SEQ ID NO: 4043 - DNA, 42 bp, Neurospora crassa; identical to SEQ ID NO: 4039
  source 1..42: mol_type = other DNA

SEQ ID NO: 4044 - DNA, 45 bp, Neurospora tetrasperma
  source 1..45: mol_type = other DNA
tggtgcaacatgaggctccaccccgataggggctgctggaagcgt

SEQ ID NO: 4045 - DNA, 33 bp, Neurospora tetrasperma
  source 1..33: mol_type = other DNA
tggtgccgcatccacggccaatcgtgctggaag

SEQ ID NO: 4046 - DNA, 39 bp, Neurospora tetrasperma
  source 1..39: mol_type = other DNA
tggtgccgcatccacggccaatcgtgctggaagaagcgt

SEQ ID NO: 4047 - DNA, 33 bp, Neurospora tetrasperma
  source 1..33: mol_type = other DNA
tggtgccgcatccacggccagtcctgctggaag

SEQ ID NO: 4048 - DNA, 33 bp, Neurospora tetrasperma; identical to SEQ ID NO: 4045
  source 1..33: mol_type = other DNA

SEQ ID NO: 4049 - DNA, 39 bp, Neurospora tetrasperma
  source 1..39: mol_type = other DNA
tgcaacgctcccgacggcgcctgcaccaaggctacccgt

SEQ ID NO: 4050 - DNA, 33 bp, Neurospora tetrasperma; identical to SEQ ID NO: 4045
  source 1..33: mol_type = other DNA

SEQ ID NO: 4051 - DNA, 39 bp, Neurospora tetrasperma; identical to SEQ ID NO: 4046
  source 1..39: mol_type = other DNA

SEQ ID NO: 4052 - DNA, 33 bp, Neurospora tetrasperma; identical to SEQ ID NO: 4047
  source 1..33: mol_type = other DNA

SEQ ID NO: 4053 - DNA, 42 bp, Neurospora tetrasperma
  source 1..42: mol_type = other DNA
tggtgctggatccatggccagtcctgctggaaggtcaagcgt

SEQ ID NO: 4054 - DNA, 39 bp, Ophiocordyceps camponoti-floridani
  source 1..39: mol_type = other DNA
tctcttggcggcccagcaagcaccgccctcggcaaggca

SEQ ID NO: 4055 - DNA, 39 bp, Ophiocordyceps camponoti-floridani
  source 1..39: mol_type = other DNA
gcgcttctggtgccagcaggcctctccgcgctgcgagca

SEQ ID NO: 4056 - DNA, 42 bp, Ophiocordyceps camponoti-floridani
  source 1..42: mol_type = other DNA
cctcttcttggggccacactgcgagttgggacggtagcacca

SEQ ID NO: 4057 - DNA, 42 bp, Ophiocordyceps camponoti-floridani; identical to SEQ ID NO: 4056
  source 1..42: mol_type = other DNA

SEQ ID NO: 4058 - DNA, 42 bp, Ophiocordyceps camponoti-floridani; identical to SEQ ID NO: 4056
  source 1..42: mol_type = other DNA

SEQ ID NO: 4059 - DNA, 48 bp, Ophiocordyceps camponoti-floridani
  source 1..48: mol_type = other DNA
acgcttggccatcttggggccgcactgcgagttgggacgcgtgcacca

SEQ ID NO: 4060 - DNA, 33 bp, Ophiocordyceps camponoti-floridani
  source 1..33: mol_type = other DNA
agggcgacatgaagtggacggccgtaaacacca

SEQ ID NO: 4061 - DNA, 39 bp, Ophiocordyceps camponoti-rufipedis
  source 1..39: mol_type = other DNA
cctcttggcggcccagcaagcaccgccctcggcatggca

SEQ ID NO: 4062 - DNA, 39 bp, Ophiocordyceps camponoti-rufipedis
  source 1..39: mol_type = other DNA
acgcttctggtgccagcaggcctctccgcgctgcgagca

SEQ ID NO: 4063 - DNA, 42 bp, Ophiocordyceps camponoti-rufipedis
  source 1..42: mol_type = other DNA
cctcttggccttggagcagatggagttggggcgcttgcacca

SEQ ID NO: 4064 - DNA, 42 bp, Ophiocordyceps camponoti-rufipedis
  source 1..42: mol_type = other DNA
cctcttgaccttggagcagatggaattgggacgcttgcacca

SEQ ID NO: 4065 - DNA, 48 bp, Ophiocordyceps camponoti-rufipedis
  source 1..48: mol_type = other DNA
gcgcttctccatggcggtgccgcactgcgaattgggacgcttgcacca

SEQ ID NO: 4066 - DNA, 45 bp, Ophiocordyceps camponoti-rufipedis
  source 1..45: mol_type = other DNA
gcgcttgacgacggtcgggcagttggagaggggacgagtgcacca

SEQ ID NO: 4067 - DNA, 36 bp, Ophiostoma piceae
  source 1..36: mol_type = other DNA
gcgcttgaggcagccctggcccatccacgtgcatag

SEQ ID NO: 4068 - DNA, 42 bp, Ophiostoma piceae
  source 1..42: mol_type = other DNA
gcgcttggccttccagcagggctggccgaccatggggcacca

SEQ ID NO: 4069 - DNA, 42 bp, Ophiostoma piceae
  source 1..42: mol_type = other DNA
acgcttgaccttccagcaaggctggccgaccatggggcacca

SEQ ID NO: 4070 - DNA, 42 bp, Penicilliopsis zonata
  source 1..42: mol_type = other DNA
gcgcttgatcttctcgcaaccctggcctggctgccagcacca

SEQ ID NO: 4071 - DNA, 42 bp, Penicilliopsis zonata
  source 1..42: mol_type = other DNA
acgcttcagcatgtagcaaccctgaccaggctgccagcacca

SEQ ID NO: 4072 - DNA, 42 bp, Penicillium antarcticum
  source 1..42: mol_type = other DNA
tggtgtggacaccccggacagggctgcttcaaggccaagcgt

SEQ ID NO: 4073 - DNA, 42 bp, Penicillium antarcticum
  source 1..42: mol_type = other DNA
tggtgtggtcatcccggccagggctgctacatgatgaagcgc

SEQ ID NO: 4074 - DNA, 42 bp, Penicillium arizonense
  source 1..42: mol_type = other DNA
acgcttagccttgaagcagccttgtccagggtgtccacacca

SEQ ID NO: 4075 - DNA, 42 bp, Penicillium arizonense
  source 1..42: mol_type = other DNA
gcgcttcatcatgtagcagccctgaccggggtgaccacacca

SEQ ID NO: 4076 - DNA, 42 bp, Penicillium brasilianum
  source 1..42: mol_type = other DNA
gcgcttgaccttggcgcagccctggccggggtgagcacacca

SEQ ID NO: 4077 - DNA, 42 bp, Penicillium brasilianum
  source 1..42: mol_type = other DNA
gcgcttcatcatgtagcagccctggccggggtgggcgcacca

SEQ ID NO: 4078 - DNA, 36 bp, Penicillium brasilianum
  source 1..36: mol_type = other DNA
gcgcttggcgcagccctggccggggtgaccacacca

SEQ ID NO: 4079 - DNA, 42 bp, Penicillium brasilianum; identical to SEQ ID NO: 4076
  source 1..42: mol_type = other DNA

SEQ ID NO: 4080 - DNA, 42 bp, Penicillium brasilianum
  source 1..42: mol_type = other DNA
gcgcttcatcatgtagcagccctgaccggggtgggcgcacca

SEQ ID NO: 4081 - DNA, 36 bp, Penicillium brasilianum; identical to SEQ ID NO: 4078
  source 1..36: mol_type = other DNA

SEQ ID NO: 4082 - DNA, 33 bp, Penicillium chrysogenum
  source 1..33: mol_type = other DNA
tcgcttgcagccctggccaatgtggccacacca

SEQ ID NO: 4083 - DNA, 42 bp, Penicillium chrysogenum
  source 1..42: mol_type = other DNA
acgcttggccttgtagcaaccctgaccgatgtggccacacca

SEQ ID NO: 4084 - DNA, 42 bp, Penicillium decumbens
  source 1..42: mol_type = other DNA
tggtgcggtcacgctggccagggctgttccaaggccaagcgc

SEQ ID NO: 4085 - DNA, 42 bp, Penicillium decumbens
  source 1..42: mol_type = other DNA
tggtgcggtcaccccggccagggctgctacatgtacaagcgt

SEQ ID NO: 4086 - DNA, 33 bp, Penicillium digitatum
  source 1..33: mol_type = other DNA
tcgcttgcagccctggccgatgtggccacacca

SEQ ID NO: 4087 - DNA, 42 bp, Penicillium digitatum
  source 1..42: mol_type = other DNA
gcgcttagccttgtagcagccctggccaatgtggccacacca

SEQ ID NO: 4088 - DNA, 33 bp, Penicillium digitatum; identical to SEQ ID NO: 4086
  source 1..33: mol_type = other DNA

SEQ ID NO: 4089 - DNA, 42 bp, Penicillium digitatum; identical to SEQ ID NO: 4087
  source 1..42: mol_type = other DNA

SEQ ID NO: 4090 - DNA, 42 bp, Penicillium rolfsii
  source 1..42: mol_type = other DNA
gcgcttaaccttggcgcagccctggccggggtgagcacacca

SEQ ID NO: 4091 - DNA, 42 bp, Penicillium rolfsii
  source 1..42: mol_type = other DNA
gcgcttcatcatgtagcagccctggcctgggtgaccgcacca

SEQ ID NO: 4092 - DNA, 33 bp, Penicillium roqueforti
  source 1..33: mol_type = other DNA
ccgcttgcagccctggccgatgtggccacacca

SEQ ID NO: 4093 - DNA, 42 bp, Penicillium roqueforti
  source 1..42: mol_type = other DNA
acgcttggccttgtagcagccctggccaatgtggccacacca

SEQ ID NO: 4094 - DNA, 42 bp, Penicillium steckii
  source 1..42: mol_type = other DNA
acgcttaaccttataacaaccctgacctgggtgaccacacca

SEQ ID NO: 4095 - DNA, 42 bp, Penicillium steckii
  source 1..42: mol_type = other DNA
acgcttcatcatgtagcaaccctgaccgggatgaccacacca

SEQ ID NO: 4096 - DNA, 42 bp, Penicillium subrubescens
  source 1..42: mol_type = other DNA
gcgcttgacctttgcgcagccctggccggggtgagcgcacca

SEQ ID NO: 4097 - DNA, 42 bp, Penicillium subrubescens
  source 1..42: mol_type = other DNA
gcgcttcatcatgtagcagccctggccagggtgggcacacca

SEQ ID NO: 4098 - DNA, 36 bp, Penicillium subrubescens
  source 1..36: mol_type = other DNA
gcgcttggcgcagccctggccggggtgaccgcacca

SEQ ID NO: 4099 - DNA, 42 bp, Phaeoacremonium minimum
  source 1..42: mol_type = other DNA
tggtgcaccaaacacggccagagctgctggaaggctaagcgc

SEQ ID NO: 4100 - DNA, 33 bp, Phaeoacremonium minimum
  source 1..33: mol_type = other DNA
tggtgcaccaagcacgggcagtcctgctggaag

SEQ ID NO: 4101 - DNA, 33 bp, Phaeoacremonium minimum
  source 1..33: mol_type = other DNA
tggtgcaccaaacacggccagagctgctggaag

SEQ ID NO: 4102 - DNA, 42 bp, Phaeoacremonium minimum
  source 1..42: mol_type = other DNA
tggtgcaccaagcacgggcagtcctgctggaaggtgaagcgc

SEQ ID NO: 4103 - DNA, 33 bp, Phialemoniopsis curvata
  source 1..33: mol_type = other DNA
tggtgccccatccgcggccagccttgctggaag

SEQ ID NO: 4104 - DNA, 36 bp, Phialemoniopsis curvata
  source 1..36: mol_type = other DNA
tggtgccccatccgcggccagccttgctggaagcgc

SEQ ID NO: 4105 - DNA, 33 bp, Phialemoniopsis curvata; identical to SEQ ID NO: 4103
  source 1..33: mol_type = other DNA

SEQ ID NO: 4106 - DNA, 39 bp, Phialocephala subalpina
  source 1..39: mol_type = other DNA
acgcttggcttttccgcaaggttggccgggataaccgca

SEQ ID NO: 4107 - DNA, 39 bp, Phialocephala subalpina
  source 1..39: mol_type = other DNA
acgcttgaccttgccacatggctgacctgggtatccgca

SEQ ID NO: 4108 - DNA, 39 bp, Phialocephala subalpina
  source 1..39: mol_type = other DNA
acgcttggccttgttgcacggctgtccggggtatccgca

SEQ ID NO: 4109 - DNA, 39 bp, Phialocephala subalpina
  source 1..39: mol_type = other DNA
acgcttagccttggagcacggctgtcctgggtaaccgca

SEQ ID NO: 4110 - DNA, 39 bp, Phialocephala subalpina
  source 1..39: mol_type = other DNA
gcgcttgaccttggagcaaggctgtccgggatatccgca

SEQ ID NO: 4111 - DNA, 39 bp, Phialocephala subalpina
  source 1..39: mol_type = other DNA
tctcttcagcttggagcaaggttgtcctcggtatccaca

SEQ ID NO: 4112 - DNA, 36 bp, Pleomassaria siparia
  source 1..36: mol_type = other DNA
acgcttagccatacatggctggccagggaagtggca

SEQ ID NO: 4113 - DNA, 36 bp, Pleomassaria siparia
  source 1..36: mol_type = other DNA
acgcttggtcatacatggctggccagggaagtggca

SEQ ID NO: 4114 - DNA, 36 bp, Pleomassaria siparia
  source 1..36: mol_type = other DNA
gcgcttgctggagcagggctggccagggaagtggca

SEQ ID NO: 4115 - DNA, 39 bp, Pleomassaria siparia
  source 1..39: mol_type = other DNA
gcgcttctccttggtgcagggctggccggggaagtggca

SEQ ID NO: 4116 - DNA, 39 bp, Pochonia chlamydosporia
  source 1..39: mol_type = other DNA
atctgcaacggcccaggaatcttgtgctggaagaaacgc

SEQ ID NO: 4117 - DNA, 42 bp, Pochonia chlamydosporia
  source 1..42: mol_type = other DNA
aggtgctggaggcctggcgagccgtgcttcaaggtaaagaga

SEQ ID NO: 4118 - DNA, 42 bp, Pochonia chlamydosporia
  source 1..42: mol_type = other DNA
tggtgcaatcgtcccgggcagtcctgctggaaggccaagaga

SEQ ID NO: 4119 - DNA, 33 bp, Pochonia chlamydosporia
  source 1..33: mol_type = other DNA
tggtgctggaggccaggccagccttgctggaag

SEQ ID NO: 4120 - DNA, 36 bp, Pochonia chlamydosporia
  source 1..36: mol_type = other DNA
tggtgctggaggccaggccagccttgctggaagcgt

SEQ ID NO: 4121 - DNA, 42 bp, Pochonia chlamydosporia
  source 1..42: mol_type = other DNA
tggtgctggaggccaggccagtcatgctggaaggcgaagcgt

SEQ ID NO: 4122 - DNA, 39 bp, Pochonia chlamydosporia; identical to SEQ ID NO: 4116
  source 1..39: mol_type = other DNA

SEQ ID NO: 4123 - DNA, 42 bp, Pochonia chlamydosporia
  source 1..42: mol_type = other DNA
tggtgccatcgtcccgggcagtcctgctggaaggccaagaga

SEQ ID NO: 4124 - DNA, 42 bp, Pochonia chlamydosporia
  source 1..42: mol_type = other DNA
tggtgctggaggcctggcgagccgtgcttcaaggtaaagaga

SEQ ID NO: 4125 - DNA, 33 bp, Pochonia chlamydosporia; identical to SEQ ID NO: 4119
  source 1..33: mol_type = other DNA

SEQ ID NO: 4126 - DNA, 36 bp, Pochonia chlamydosporia; identical to SEQ ID NO: 4120
  source 1..36: mol_type = other DNA

SEQ ID NO: 4127 - DNA, 42 bp, Pochonia chlamydosporia; identical to SEQ ID NO: 4121
  source 1..42: mol_type = other DNA

SEQ ID NO: 4128 - DNA, 33 bp, Pochonia chlamydosporia
  source 1..33: mol_type = other DNA
tggtgctggaggccaggccagtcatgctggaag

SEQ ID NO: 4129 - DNA, 39 bp, Podospora comata
  source 1..39: mol_type = other DNA
tgcaccgccgaggacggcgcctgcaccaaggccaagcgc

SEQ ID NO: 4130 - DNA, 39 bp, Podospora comata
  source 1..39: mol_type = other DNA
tggtgcctccgtttcgtcggccagtcctgctggaagcgc

SEQ ID NO: 4131 - DNA, 42 bp, Podospora comata
  source 1..42: mol_type = other DNA
tggtgcaacaccgagggccaggcctgcaacaccgttgcccgc

SEQ ID NO: 4132 - DNA, 42 bp, Polychaeton citri
  source 1..42: mol_type = other DNA
ttctgcggtgccccaggtgcctcgtgcgctaaagtgaagcgc

SEQ ID NO: 4133 - DNA, 39 bp, Polyplosphaeria fusca
  source 1..39: mol_type = other DNA
tgcggcatgcctggagctccttgcaaccgtctcaagcgc

SEQ ID NO: 4134 - DNA, 39 bp, Polyplosphaeria fusca
  source 1..39: mol_type = other DNA
tgcctcttcagtggccagtcttgctccgctgcaaaacgt

SEQ ID NO: 4135 - DNA, 36 bp, Polyplosphaeria fusca
  source 1..36: mol_type = other DNA
tgccgcttcccaggatcgttctgtggcaagaagagg

SEQ ID NO: 4136 - DNA, 39 bp, Polyplosphaeria fusca
  source 1..39: mol_type = other DNA
tgccgcttcccgggctcgttctgcggcaagagcaagcgt

SEQ ID NO: 4137 - DNA, 36 bp, Polyplosphaeria fusca
  source 1..36: mol_type = other DNA
tgccgctatccaggctccttctgtggcaggaagagg

SEQ ID NO: 4138 - DNA, 39 bp, Polyplosphaeria fusca
  source 1..39: mol_type = other DNA
tgctcctttggtgacgatacttgcgcgaagatcaagcgc

SEQ ID NO: 4139 - DNA, 42 bp, Pseudogymnoascus destructans
  source 1..42: mol_type = other DNA
acgcttgactttgccgcatagctgaccaggacgctggcagaa

SEQ ID NO: 4140 - DNA, 42 bp, Pseudogymnoascus destructans
  source 1..42: mol_type = other DNA
tcgcttgactttgtcgcagggctggccgaggcgccagcagaa

SEQ ID NO: 4141 - DNA, 42 bp, Pseudogymnoascus destructans
  source 1..42: mol_type = other DNA
gcgcttggccttttcgcatatctggcctggacgccagcagaa

SEQ ID NO: 4142 - DNA, 42 bp, Pseudogymnoascus destructans
  source 1..42: mol_type = other DNA
acgcttggccttgccgcatggctgcccggggcgccagcagaa

SEQ ID NO: 4143 - DNA, 42 bp, Pseudogymnoascus destructans
  source 1..42: mol_type = other DNA
gcgcttgaccttgccacatggctgccctggacgccagcagaa

SEQ ID NO: 4144 - DNA, 42 bp, Pseudogymnoascus destructans
  source 1..42: mol_type = other DNA
ttctgccagcgtcctggtcagctatgcggcaaagtcaagcgt

SEQ ID NO: 4145 - DNA, 42 bp, Pseudogymnoascus destructans
  source 1..42: mol_type = other DNA
ttctgctggcgcctcggccagccctgcgacaaagtcaagcga

SEQ ID NO: 4146 - DNA, 42 bp, Pseudogymnoascus destructans
  source 1..42: mol_type = other DNA
ttctgctggcgtccaggccagatatgcgaaaaggccaagcgc

SEQ ID NO: 4147 - DNA, 42 bp, Pseudogymnoascus destructans
  source 1..42: mol_type = other DNA
ttctgctggcgccccgggcagccatgcggcaaggccaagcgt

SEQ ID NO: 4148 - DNA, 42 bp, Pseudogymnoascus destructans
  source 1..42: mol_type = other DNA
ttctgctggcgtccagggcagccatgtggcaaggtcaagcgc

SEQ ID NO: 4149 - DNA, 39 bp, Pseudogymnoascus sp.
  source 1..39: mol_type = other DNA; note = 03VT05
tgctggcgcccaggtcagccatgcggtaaggccaagcgt

SEQ ID NO: 4150 - DNA, 39 bp, Pseudogymnoascus sp.
  source 1..39: mol_type = other DNA; note = 03VT05
tgctggcgccccggccagccctgcggcaaagtcaagcgc

SEQ ID NO: 4151 - DNA, 42 bp, Pseudogymnoascus sp.
  source 1..42: mol_type = other DNA; note = 03VT05
atctgctggcgcccaggtcagccatgcggtaaggccaagcgt

SEQ ID NO: 4152 - DNA, 39 bp, Pseudogymnoascus sp.; identical to SEQ ID NO: 4149
  source 1..39: mol_type = other DNA; note = 05NY08

SEQ ID NO: 4153 - DNA, 39 bp, Pseudogymnoascus sp.; identical to SEQ ID NO: 4150
  source 1..39: mol_type = other DNA; note = 05NY08

SEQ ID NO: 4154 - DNA, 42 bp, Pseudogymnoascus sp.; identical to SEQ ID NO: 4151
  source 1..42: mol_type = other DNA; note = 05NY08

SEQ ID NO: 4155 - DNA, 39 bp, Pseudogymnoascus sp.
  source 1..39: mol_type = other DNA; note = 24MN13
acgcttgaccttgccgcatggctgacctggacgccagca

SEQ ID NO: 4156 - DNA, 42 bp, Pseudogymnoascus sp.
  source 1..42: mol_type = other DNA; note = 24MN13
acgcttagccttgccgcatggctgacctgggcgccagcagat

SEQ ID NO: 4157 - DNA, 24 bp, Pseudogymnoascus sp.
  source 1..24: mol_type = other DNA; note = 24MN13
acgcttagccttgccgcatggctg

SEQ ID NO: 4158 - DNA, 42 bp, Pseudogymnoascus sp.
  source 1..42: mol_type = other DNA; note = 23342-1-I1
acgcttggccttgccacatggctggccaggacgccagcaaaa

SEQ ID NO: 4159 - DNA, 42 bp, Pseudogymnoascus sp.
  source 1..42: mol_type = other DNA; note = 23342-1-I1
gcgcttgaccttgccacatggctggccagggcgccagcagaa

SEQ ID NO: 4160 - DNA, 39 bp, Pseudogymnoascus sp.
  source 1..39: mol_type = other DNA; note = VKM F-103
tgctggcgccccggtcagccatgcggcaaggctaagcgt

SEQ ID NO: 4161 - DNA, 39 bp, Pseudogymnoascus sp.; identical to SEQ ID NO: 4150
  source 1..39: mol_type = other DNA; note = VKM F-103

SEQ ID NO: 4162 - DNA, 42 bp, Pseudogymnoascus sp.
  source 1..42: mol_type = other DNA; note = VKM F-103
atctgctggcgccccggtcagccatgcggcaaggctaagcgt

SEQ ID NO: 4163 - DNA, 39 bp, Pseudogymnoascus sp.
  source 1..39: mol_type = other DNA; note = VKM F-3557
tgctggcgccccggtcagccttgtggcaaggccaagcgt

SEQ ID NO: 4164 - DNA, 39 bp, Pseudogymnoascus sp.
  source 1..39: mol_type = other DNA; note = VKM F-3557
tgctggcgccccggccagccctgcggaaaggtcaagcgc

SEQ ID NO: 4165 - DNA, 42 bp, Pseudogymnoascus sp.
  source 1..42: mol_type = other DNA; note = VKM F-3557
atctgctggcgtccaggccagccatgcggaaaagccaagcgc

SEQ ID NO: 4166 - DNA, 39 bp, Pseudogymnoascus sp.
  source 1..39: mol_type = other DNA; note = VKM F-3775
acgcttagccttaccgcatggctgaccggggcgccagca

SEQ ID NO: 4167 - DNA, 39 bp, Pseudogymnoascus sp.
  source 1..39: mol_type = other DNA; note = VKM F-3775
gcgcttaaccttgccacatggctgacccgggcgccaaca

SEQ ID NO: 4168 - DNA, 39 bp, Pseudogymnoascus sp.
  source 1..39: mol_type = other DNA; note = VKM F-4246
acgcttggccttgccgcatggctggcccggaagccagca

SEQ ID NO: 4169 - DNA, 39 bp, Pseudogymnoascus sp.
  source 1..39: mol_type = other DNA; note = VKM F-4246
acgcttgaccttgccgcatggctggcctggaagccagca

SEQ ID NO: 4170 - DNA, 39 bp, Pseudogymnoascus sp.
  source 1..39: mol_type = other DNA; note = VKM F-4281
acgcttggcctttccacatggctgtccagggcgatggca

SEQ ID NO: 4171 - DNA, 39 bp, Pseudogymnoascus sp.
  source 1..39: mol_type = other DNA; note = VKM F-4281
gcgcttgactttgccgcagggctgtccggggcgatggca

SEQ ID NO: 4172 - DNA, 42 bp, Pseudogymnoascus sp.
  source 1..42: mol_type = other DNA; note = VKM F-4281
gcgcttcagcttgccacatggctgtccagggcgatggcagaa

SEQ ID NO: 4173 - DNA, 42 bp, Pseudogymnoascus sp.
  source 1..42: mol_type = other DNA; note = VKM F-4281
gcgcttggccttgccacatggccgtccagggcgatggcagaa

SEQ ID NO: 4174 - DNA, 39 bp, Pseudogymnoascus sp.; identical to SEQ ID NO: 4168
  source 1..39: mol_type = other DNA; note = VKM F-4513

SEQ ID NO: 4175 - DNA, 39 bp, Pseudogymnoascus sp.; identical to SEQ ID NO: 4169
  source 1..39: mol_type = other DNA; note = VKM F-4513

SEQ ID NO: 4176 - DNA, 39 bp, Pseudogymnoascus sp.
  source 1..39: mol_type = other DNA; note = VKM F-4514
acgcttggccttgccacaaggctgaccggggcgccagca

SEQ ID NO: 4177 - DNA, 39 bp, Pseudogymnoascus sp.
  source 1..39: mol_type = other DNA; note = VKM F-4514
gcgcttgaccttgccacagggctggccggggcgccagca

SEQ ID NO: 4178 - DNA, 42 bp, Pseudogymnoascus sp.
  source 1..42: mol_type = other DNA; note = VKM F-4514
acgcttggccttgccacaaggctgaccggggcgccagcaaat

SEQ ID NO: 4179 - DNA, 42 bp, Pseudogymnoascus sp.
  source 1..42: mol_type = other DNA; note = VKM F-4515
tactgctggcgccccggtcagccatgcggaaaggccaagcgt

SEQ ID NO: 4180 - DNA, 42 bp, Pseudogymnoascus sp.
  source 1..42: mol_type = other DNA; note = VKM F-4515
tactgctggcgccctggccagccctgcgggaaagtcaagcgt

SEQ ID NO: 4181 - DNA, 39 bp, Pseudogymnoascus sp.; identical to SEQ ID NO: 4163
  source 1..39: mol_type = other DNA; note = VKM F-4516

SEQ ID NO: 4182 - DNA, 39 bp, Pseudogymnoascus sp.; identical to SEQ ID NO: 4164
  source 1..39: mol_type = other DNA; note = VKM F-4516

SEQ ID NO: 4183 - DNA, 42 bp, Pseudogymnoascus sp.; identical to SEQ ID NO: 4165
  source 1..42: mol_type = other DNA; note = VKM F-4516

SEQ ID NO: 4184 - DNA, 42 bp, Pseudogymnoascus sp.
  source 1..42: mol_type = other DNA; note = VKM F-4517
acgcttggccttgccgcatggctggccaggacgccagcagta

SEQ ID NO: 4185 - DNA, 42 bp, Pseudogymnoascus sp.
  source 1..42: mol_type = other DNA; note = VKM F-4517
acgcttgactttcccgcagggctggccagggcgccagcagta

SEQ ID NO: 4186 - DNA, 42 bp, Pseudogymnoascus sp.
  source 1..42: mol_type = other DNA; note = VKM F-4518
ttctgctggcgtccaggacagccctgcggaaaagccaagcgc

SEQ ID NO: 4187 - DNA, 42 bp, Pseudogymnoascus sp.
  source 1..42: mol_type = other DNA; note = VKM F-4518
ttctgctggcgccccggacagccctgcggcaaggtcaagcgt

SEQ ID NO: 4188 - DNA, 39 bp, Pseudogymnoascus sp.; identical to SEQ ID NO: 4160
  source 1..39: mol_type = other DNA; note = VKM F-4519

SEQ ID NO: 4189 - DNA, 39 bp, Pseudogymnoascus sp.
  source 1..39: mol_type = other DNA; note = VKM F-4519
tgctggcgccccggccagccctgcggcaaagtcaagcgt

SEQ ID NO: 4190 - DNA, 42 bp, Pseudogymnoascus sp.; identical to SEQ ID NO: 4162
  source 1..42: mol_type = other DNA; note = VKM F-4519

SEQ ID NO: 4191 - DNA, 42 bp, Pseudogymnoascus sp.
  source 1..42: mol_type = other DNA; note = VKM F-4520
acgcttagctttgccgcatggctggccaggacgccagcagaa

SEQ ID NO: 4192 - DNA, 42 bp, Pseudogymnoascus sp.
  source 1..42: mol_type = other DNA; note = VKM F-4520
acgcttgactttgccgcagggctgtccgggacgccagcagaa

SEQ ID NO: 4193 - DNA, 39 bp, Pseudogymnoascus sp.
  source 1..39: mol_type = other DNA; note = WSF 3629
tgctggcgccccggccagccctgtggcatagtcaagcgt

SEQ ID NO: 4194 - DNA, 39 bp, Pseudogymnoascus sp.
  source 1..39: mol_type = other DNA; note = WSF 3629
tgctggcgtcccggtcagccatgcggtaaggccaagcgt

SEQ ID NO: 4195 - DNA, 39 bp, Pseudogymnoascus sp.
  source 1..39: mol_type = other DNA; note = WSF 3629
tgctggcgccctggccagccatgtggcaaggtcaagcgc

SEQ ID NO: 4196 - DNA, 42 bp, Pseudogymnoascus sp.
  source 1..42: mol_type = other DNA; note = WSF 3629
atctgctggcgtcccggtcagccatgcggtaaggccaagcgt

SEQ ID NO: 4197 - DNA, 39 bp, Pseudogymnoascus verrucosus
  source 1..39: mol_type = other DNA
acgcttagccttgccgcatggctgaccggggcgccagca

SEQ ID NO: 4198 - DNA, 39 bp, Pseudogymnoascus verrucosus; identical to SEQ ID NO: 4155
  source 1..39: mol_type = other DNA

SEQ ID NO: 4199 - DNA, 42 bp, Pseudogymnoascus verrucosus
  source 1..42: mol_type = other DNA
acgcttagccttgccgcatggctgaccggggcgccagcagat

SEQ ID NO: 4200 - DNA, 33 bp, Purpureocillium lilacinum
  source 1..33: mol_type = other DNA
tggtgcaaccgacccggccagccatgcaagcga

SEQ ID NO: 4201 - DNA, 33 bp, Purpureocillium lilacinum
  source 1..33: mol_type = other DNA
tggtgcactcgccccggtcagccctgcaagcga

SEQ ID NO: 4202 - DNA, 33 bp, Purpureocillium lilacinum
  source 1..33: mol_type = other DNA
tggtgcactcgccgaggccaaccttgcaagcgt

SEQ ID NO: 4203 - DNA, 42 bp, Purpureocillium lilacinum
  source 1..42: mol_type = other DNA
tggtgctaccgacccggccagccttgccgcaaggccaagcgc

SEQ ID NO: 4204 - DNA, 33 bp, Purpureocillium lilacinum; identical to SEQ ID NO: 4200
  source 1..33: mol_type = other DNA

SEQ ID NO: 4205 - DNA, 33 bp, Purpureocillium lilacinum
  source 1..33: mol_type = other DNA
tggtgcactcgccccggccagccctgcaagcga

SEQ ID NO: 4206 - DNA, 33 bp, Purpureocillium lilacinum; identical to SEQ ID NO: 4202
  source 1..33: mol_type = other DNA

SEQ ID NO: 4207 - DNA, 42 bp, Purpureocillium lilacinum; identical to SEQ ID NO: 4203
  source 1..42: mol_type = other DNA

SEQ ID NO: 4208 - DNA, 33 bp, Purpureocillium lilacinum; identical to SEQ ID NO: 4200
  source 1..33: mol_type = other DNA

SEQ ID NO: 4209 - DNA, 33 bp, Purpureocillium lilacinum; identical to SEQ ID NO: 4205
  source 1..33: mol_type = other DNA

SEQ ID NO: 4210 - DNA, 33 bp, Purpureocillium lilacinum; identical to SEQ ID NO: 4202
  source 1..33: mol_type = other DNA

SEQ ID NO: 4211 - DNA, 42 bp, Purpureocillium lilacinum; identical to SEQ ID NO: 4203
  source 1..42: mol_type = other DNA

SEQ ID NO: 4212 - DNA, 42 bp, Pyricularia grisea
  source 1..42: mol_type = other DNA
ccgcttggccacgtcgcacgcctcgcccgcctcgttgcagtg

SEQ ID NO: 4213 - DNA, 36 bp, Pyricularia grisea
  source 1..36: mol_type = other DNA
ccgcttccagcacggctggcctcggcgcgggcacca

SEQ ID NO: 4214 - DNA, 42 bp, Pyricularia grisea
  source 1..42: mol_type = other DNA
ccgcttgaccttccagcagggctggccgcggcggggacacca

SEQ ID NO: 4215 - DNA, 42 bp, Pyricularia oryzae
  source 1..42: mol_type = other DNA
cactgcaactctgccggcgaggcctgcgacgtggccaagcgc

SEQ ID NO: 4216 - DNA, 36 bp, Pyricularia oryzae
  source 1..36: mol_type = other DNA
tggtgcccccgccgcggccagccctgctggaagcgc

SEQ ID NO: 4217 - DNA, 33 bp, Pyricularia oryzae
  source 1..33: mol_type = other DNA
tggtgcccccgccgcggccagccctgctggaag

SEQ ID NO: 4218 - DNA, 42 bp, Pyricularia oryzae; identical to SEQ ID NO: 4215
  source 1..42: mol_type = other DNA

SEQ ID NO: 4219 - DNA, 36 bp, Pyricularia oryzae; identical to SEQ ID NO: 4216
  source 1..36: mol_type = other DNA

SEQ ID NO: 4220 - DNA, 33 bp, Pyricularia oryzae; identical to SEQ ID NO: 4217
  source 1..33: mol_type = other DNA

SEQ ID NO: 4221 - DNA, 42 bp, Pyricularia oryzae
  source 1..42: mol_type = other DNA
gcgcttggccacgtcgcaggcctcgccggcagagttgcagtg

SEQ ID NO: 4222 - DNA, 36 bp, Pyricularia oryzae
  source 1..36: mol_type = other DNA
ccgcttccagcagggctggccgcgacgcgggcacca

SEQ ID NO: 4223 - DNA, 33 bp, Pyricularia oryzae
  source 1..33: mol_type = other DNA
cttccagcaaggctggcctcggcgcgggcacca

SEQ ID NO: 4224 - DNA, 42 bp, Pyricularia oryzae; identical to SEQ ID NO: 4215
  source 1..42: mol_type = other DNA

SEQ ID NO: 4225 - DNA, 36 bp, Pyricularia oryzae; identical to SEQ ID NO: 4216
  source 1..36: mol_type = other DNA

SEQ ID NO: 4226 - DNA, 33 bp, Pyricularia oryzae; identical to SEQ ID NO: 4217
  source 1..33: mol_type = other DNA

SEQ ID NO: 4227 - DNA, 33 bp, Pyricularia pennisetigena; identical to SEQ ID NO: 4217
  source 1..33: mol_type = other DNA

SEQ ID NO: 4228 - DNA, 42 bp, Pyricularia pennisetigena
  source 1..42: mol_type = other DNA
tggtgcccccgccgcggccagccctgctggaaggtcaagcgc

SEQ ID NO: 4229 - DNA, 42 bp, Pyricularia sp.
  source 1..42: mol_type = other DNA; note = CBS 133598
ccgcttggccacgtcgcacgcctcgccggcagagttgcagtg

SEQ ID NO: 4230 - DNA, 36 bp, Pyricularia sp.
  source 1..36: mol_type = other DNA; note = CBS 133598
ccgcttccagcacggctgcccacggcgcgggcacca

SEQ ID NO: 4231 - DNA, 42 bp, Pyricularia sp.
  source 1..42: mol_type = other DNA; note = CBS 133598
ccgcttgaccttccagcagggctggccgcggcgggggcacca

SEQ ID NO: 4232 - DNA, 39 bp, Ramularia collo-cygni
  source 1..39: mol_type = other DNA
tgtggtgcccctggtgtcgcctgccacaaggcccgccgc

SEQ ID NO: 4233 - DNA, 39 bp, Ramularia collo-cygni
  source 1..39: mol_type = other DNA
tgcggaattcccggatctccctgcgctcgtctgaagcgt

SEQ ID NO: 4234 - DNA, 39 bp, Ramularia collo-cygni
  source 1..39: mol_type = other DNA
tgcaacgcacccggtggtgcttgcgacattgccaagcgc

SEQ ID NO: 4235 - DNA, 42 bp, Ramularia collo-cygni
  source 1..42: mol_type = other DNA
ttctgcggtccccgtggtgtctcctgcgccaaggcgaagcgt

SEQ ID NO: 4236 - DNA, 42 bp, Ramularia collo-cygni
  source 1..42: mol_type = other DNA
ttctgcggtccccgtggcgtctcctgcgccaagaccaagcgt

SEQ ID NO: 4237 - DNA, 42 bp, Ramularia collo-cygni
  source 1..42: mol_type = other DNA
ttctgcggtccccgtggcgtatcttgcgccaaggtcaagcgc

SEQ ID NO: 4238 - DNA, 39 bp, Rhizodiscina lignyota
  source 1..39: mol_type = other DNA
tgcaacaaggacggccagccgtgcgccaaggcaaagcgt

SEQ ID NO: 4239 - DNA, 39 bp, Rhizodiscina lignyota
  source 1..39: mol_type = other DNA
tgctacaaggagggcgggaaatgccagaaagctaaacgt

SEQ ID NO: 4240 - DNA, 42 bp, Rhizodiscina lignyota
  source 1..42: mol_type = other DNA
ctctgccaccttgttggccaaccatgcctcaagaaaaagcga

SEQ ID NO: 4241 - DNA, 63 bp, Rutstroemia sp.
  source 1..63: mol_type = other DNA; note = NJR-2017a BBW
ttcgatgaggcggttgtgaagaggtgtaatatggtgggcggagcgtgttatgaggctaagaga

SEQ ID NO: 4242 - DNA, 30 bp, Rutstroemia sp.
  source 1..30: mol_type = other DNA; note = NJR-2017a BBW
tggtgcggacgcccaggccaaccctgcaaa

SEQ ID NO: 4243 - DNA, 33 bp, Rutstroemia sp.
  source 1..33: mol_type = other DNA; note = NJR-2017a BBW
tggtgcggacgcccaggacagccctgcaagcgt

SEQ ID NO: 4244 - DNA, 42 bp, Rutstroemia sp.
  source 1..42: mol_type = other DNA; note = NJR-2017a BBW
tggtgtggacgtccagggcagccgtgtaggaaggcgaagaga

SEQ ID NO: 4245 - DNA, 63 bp, Rutstroemia sp.
  source 1..63: mol_type = other DNA; note = NJR-2017a BVV2
ttcgatgaggcggttgtgaagagatgtaatatggttggaggagcttgttatgaggcgaagagg

SEQ ID NO: 4246 - DNA, 30 bp, Rutstroemia sp.
  source 1..30: mol_type = other DNA; note = NJR-2017a BVV2
tggtgcggacgtcccggacaaccgtgcaag

SEQ ID NO: 4247 - DNA, 33 bp, Rutstroemia sp.
  source 1..33: mol_type = other DNA; note = NJR-2017a BVV2
tggtgcggacgtcccggacaaccgtgcaagcgg

SEQ ID NO: 4248 - DNA, 42 bp, Rutstroemia sp.
  source 1..42: mol_type = other DNA; note = NJR-2017a BVV2
tggtgtggacgtcctggccagccttgtcgtaaggcgaagaga

SEQ ID NO: 4249 - DNA, 42 bp, Rutstroemia sp.
  source 1..42: mol_type = other DNA; note = NJR-2017a BVV2
tggtgcggacgcccaggacagccatgccgcaaagtgcgacgt

SEQ ID NO: 4250 - DNA, 63 bp, Rutstroemia sp.
  source 1..63: mol_type = other DNA; note = NJR-2017a WRK4
tctcttagcctcataacatgctccccccaccatattacacctcttcacaaccgcctcatcgaa

SEQ ID NO: 4251 - DNA, 30 bp, Rutstroemia sp.
  source 1..30: mol_type = other DNA; note = NJR-2017a WRK4
cttgcaaggctgtccgggacgaccgcacca

SEQ ID NO: 4252 - DNA, 33 bp, Rutstroemia sp.
  source 1..33: mol_type = other DNA; note = NJR-2017a WRK4
ccgcttgcacggttgtccgggacggccgcacca

SEQ ID NO: 4253 - DNA, 42 bp, Rutstroemia sp.
  source 1..42: mol_type = other DNA; note = NJR-2017a WRK4
tctcttcgccttcctacacggctgccctggacgaccacacca

SEQ ID NO: 4254 - DNA, 42 bp, Saccharata proteae
  source 1..42: mol_type = other DNA; strain = CBS 121410
acgcttggccttggagcagggttgaccggggagatggcagaa

SEQ ID NO: 4255 - DNA, 42 bp, Saccharata proteae
  source 1..42: mol_type = other DNA; strain = CBS 121410
acgcttcagcttggagcaaggctggccgggcaagtggcagaa

SEQ ID NO: 4256 - DNA, 42 bp, Saccharata proteae
  source 1..42: mol_type = other DNA; strain = CBS 121410
acgcttggtcttggagcagggctggccgggaaggtggcagaa

SEQ ID NO: 4257 - DNA, 42 bp, Sclerotinia borealis
  source 1..42: mol_type = other DNA; strain = F-4128
agatgcaacatggtcggtggtgcttgcttcgaggccaagaga

SEQ ID NO: 4258 - DNA, 30 bp, Sclerotinia borealis
  source 1..30: mol_type = other DNA; strain = F-4128
tggtgcggacgccccggacaaccatgcaag

SEQ ID NO: 4259 - DNA, 39 bp, Sclerotinia borealis
  source 1..39: mol_type = other DNA; strain = F-4128
tggtgcggacgccctggacaaccatgtaaggagaagcgt

SEQ ID NO: 4260 - DNA, 33 bp, Sclerotinia borealis; identical to SEQ ID NO: 3677
  source 1..33: mol_type = other DNA; strain = F-4128

SEQ ID NO: 4261 - DNA, 42 bp, Sclerotinia borealis
  source 1..42: mol_type = other DNA; strain = F-4128
tggtgcggacgcccaggtcaaccttgccgcaaggctaagaga

SEQ ID NO: 4262 - DNA, 42 bp, Sclerotinia borealis
  source 1..42: mol_type = other DNA; strain = F-4128
tggtgcggacgccccggacaaccatgccgcaagaacaagcgc

SEQ ID NO: 4263 - DNA, 42 bp, Sclerotinia sclerotiorum
  source 1..42: mol_type = other DNA
tctcttagcctcgaagcaagcaccaccaaccatgttgcatct

SEQ ID NO: 4264 - DNA, 30 bp, Sclerotinia sclerotiorum
  source 1..30: mol_type = other DNA
cttacaaggttgaccaggacgtccgcacca

SEQ ID NO: 4265 - DNA, 33 bp, Sclerotinia sclerotiorum
  source 1..33: mol_type = other DNA
acgcttgcatggttgaccgggacgtccgcacca

SEQ ID NO: 4266 - DNA, 42 bp, Sclerotinia sclerotiorum
  source 1..42: mol_type = other DNA
tctcttagccttgcgacaaggttgaccgggacgaccgcacca

SEQ ID NO: 4267 - DNA, 42 bp, Sclerotinia sclerotiorum
  source 1..42: mol_type = other DNA
acgcttgttcttgcggcaaggttgaccagggcgtccgcacca

SEQ ID NO: 4268 - DNA, 39 bp, Sclerotinia sclerotiorum
  source 1..39: mol_type = other DNA
tgcaacatggttggtggtgcttgcttcgaggctaagaga

SEQ ID NO: 4269 - DNA, 30 bp, Sclerotinia sclerotiorum
  source 1..30: mol_type = other DNA
tggtgcggacgcccaggccaaccatgcaag

SEQ ID NO: 4270 - DNA, 33 bp, Sclerotinia sclerotiorum
  source 1..33: mol_type = other DNA
tggtgcggacgcccaggccaaccatgcaagcgc

SEQ ID NO: 4271 - DNA, 42 bp, Sclerotinia sclerotiorum
  source 1..42: mol_type = other DNA
tggtgcggtcgtcccggtcaaccttgtcgcaaggctaagaga

SEQ ID NO: 4272 - DNA, 42 bp, Sclerotinia sclerotiorum
  source 1..42: mol_type = other DNA
tggtgcggacgccctggtcaaccttgccgcaagaacaagcgt

SEQ ID NO: 4273 - DNA, 39 bp, Sodiomyces alkalinus
  source 1..39: mol_type = other DNA
tgcaccaagcccggccaaccgtgctggaagaacaagcgt

SEQ ID NO: 4274 - DNA, 30 bp, Sodiomyces alkalinus
  source 1..30: mol_type = other DNA
tgcaccaagcccggccaaccgtgctggaag

SEQ ID NO: 4275 - DNA, 33 bp, Sordaria macrospora; identical to SEQ ID NO: 4047
  source 1..33: mol_type = other DNA

SEQ ID NO: 4276 - DNA, 45 bp, Sordaria macrospora
  source 1..45: mol_type = other DNA
tggtgccggatccatggccagtcgtgctggaagaaggccaagcgc

SEQ ID NO: 4277 - DNA, 36 bp, Sordaria macrospora
  source 1..36: mol_type = other DNA
tggtgccggatccatggccagtcgtgctggaagaag

SEQ ID NO: 4278 - DNA, 36 bp, Sordaria macrospora
  source 1..36: mol_type = other DNA
tggtgccgcatccacggccagtcctgctggaagcgc

SEQ ID NO: 4279 - DNA, 33 bp, Sordaria macrospora; identical to SEQ ID NO: 4047
  source 1..33: mol_type = other DNA

SEQ ID NO: 4280 - DNA, 33 bp, Sordaria macrospora; identical to SEQ ID NO: 4047
  source 1..33: mol_type = other DNA

SEQ ID NO: 4281 - DNA, 45 bp, Sordaria macrospora; identical to SEQ ID NO: 4276
  source 1..45: mol_type = other DNA

SEQ ID NO: 4282 - DNA, 36 bp, Sordaria macrospora; identical to SEQ ID NO: 4277
  source 1..36: mol_type = other DNA

SEQ ID NO: 4283 - DNA, 36 bp, Sordaria macrospora; identical to SEQ ID NO: 4278
  source 1..36: mol_type = other DNA

SEQ ID NO: 4284 - DNA, 33 bp, Sordaria macrospora; identical to SEQ ID NO: 4047
  source 1..33: mol_type = other DNA

SEQ ID NO: 4285 - DNA, 42 bp, unidentified
  misc_feature 1..42: note = TPA: Pheromone PPGAPutative uncharacterized protein
  source 1..42: mol_type = other DNA
acgcttggtcggggggcagattctaccggcgaatctgcacca

SEQ ID NO: 4286 - DNA, 42 bp, unidentified
  misc_feature 1..42: note = TPA: Pheromone PPGAPutative uncharacterized protein
  source 1..42: mol_type = other DNA
acgtttggccttgccacaaacctggccacggaacctgcacca

SEQ ID NO: 4287 - DNA, 33 bp, Sporothrix brasiliensis
  source 1..33: mol_type = other DNA
cttccaacaggactggcctttcagggggcagta

SEQ ID NO: 4288 - DNA, 33 bp, Sporothrix brasiliensis
  source 1..33: mol_type = other DNA
cttccagcaggactggcccttcagggggcaata

SEQ ID NO: 4289 - DNA, 42 bp, Sporothrix brasiliensis
  source 1..42: mol_type = other DNA
gcgcttgttcttccagcacggctggccgggcaggggacagta

SEQ ID NO: 4290 - DNA, 42 bp, Sporothrix brasiliensis
  source 1..42: mol_type = other DNA
gcgcttgacctggtaacacgactggccggcctgctgacagta

SEQ ID NO: 4291 - DNA, 39 bp, Sporothrix insectorum
  source 1..39: mol_type = other DNA
tgctacgggcccggcggccactgtgccgcggccaagcgg

SEQ ID NO: 4292 - DNA, 42 bp, Sporothrix insectorum
  source 1..42: mol_type = other DNA
ttctgcatgtggttcggccagtcctgctggaaggtcaagcgc

SEQ ID NO: 4293 - DNA, 39 bp, Sporothrix insectorum
  source 1..39: mol_type = other DNA
ttttgcatgtggtttggccagtcctgctggaggaagcgc

SEQ ID NO: 4294 - DNA, 33 bp, Sporothrix schenckii
  source 1..33: mol_type = other DNA
tactgccccctgaaaggccagtcctgctggaag

SEQ ID NO: 4295 - DNA, 42 bp, Sporothrix schenckii
  source 1..42: mol_type = other DNA
tactgtcccctgcccggccagccgtgctggaagaacaagcgc

SEQ ID NO: 4296 - DNA, 42 bp, Sporothrix schenckii
  source 1..42: mol_type = other DNA
tactgccagtcggtcggccagtcgtgttaccaggtcaagcgc

SEQ ID NO: 4297 - DNA, 33 bp, Sporothrix schenckii
  source 1..33: mol_type = other DNA
cttccagcaggactggcctttcagggggcagta

SEQ ID NO: 4298 - DNA, 42 bp, Sporothrix schenckii; identical to SEQ ID NO: 4289
  source 1..42: mol_type = other DNA

SEQ ID NO: 4299 - DNA, 42 bp, Sporothrix schenckii
  source 1..42: mol_type = other DNA
gcgcttgacctggtaacacgactggccgaccgactggcagta

SEQ ID NO: 4300 - DNA, 30 bp, Stachybotrys chartarum
  source 1..30: mol_type = other DNA
ccagcacggctggccggggcgcgtgcacca

SEQ ID NO: 4301 - DNA, 39 bp, Stachybotrys chartarum
  source 1..39: mol_type = other DNA
acgcttcttccagcatggctggccggggcgcgtgcacca

SEQ ID NO: 4302 - DNA, 42 bp, Stachybotrys chartarum
  source 1..42: mol_type = other DNA
gcgcttgaccttccagcacggctggccgggacggacgcacca

SEQ ID NO: 4303 - DNA, 30 bp, Stachybotrys chartarum; identical to SEQ ID NO: 4300
  source 1..30: mol_type = other DNA

SEQ ID NO: 4304 - DNA, 39 bp, Stachybotrys chartarum; identical to SEQ ID NO: 4301
  source 1..39: mol_type = other DNA

SEQ ID NO: 4305 - DNA, 42 bp, Stachybotrys chartarum; identical to SEQ ID NO: 4302
  source 1..42: mol_type = other DNA

SEQ ID NO: 4306 - DNA, 42 bp, Stachybotrys chartarum
  source 1..42: mol_type = other DNA
tggtgcacacgtcccgggcagccgtgctggaaggccaagcgc

SEQ ID NO: 4307 - DNA, 39 bp, Stachybotrys chartarum
  source 1..39: mol_type = other DNA
tggtgcacgcgccccggccagccatgctggaagaagcgt

SEQ ID NO: 4308 - DNA, 42 bp, Stachybotrys chartarum
  source 1..42: mol_type = other DNA
tggtgcgtccgtcccggccagccgtgctggaaggtcaagcgc

SEQ ID NO: 4309 - DNA, 30 bp, Stachybotrys chlorohalonata
  source 1..30: mol_type = other DNA
ccagcacggctggccgggacgcgtgcacca

SEQ ID NO: 4310 - DNA, 42 bp, Stachybotrys chlorohalonata
  source 1..42: mol_type = other DNA
acgcttctccttccagcatggctgaccgggacgcgtgcacca

SEQ ID NO: 4311 - DNA, 42 bp, Stachybotrys chlorohalonata; identical to SEQ ID NO: 4302
  source 1..42: mol_type = other DNA

SEQ ID NO: 4312 - DNA, 39 bp, Thermothielavioides terrestris
  source 1..39: mol_type = other DNA
tgcgagagcgagggcaacgcgtgctggaccgccaagcgc

SEQ ID NO: 4313 - DNA, 39 bp, Thermothielavioides terrestris
  source 1..39: mol_type = other DNA
atgtgcagccggttcgtgggcgagtcgtgctacaagcgc

SEQ ID NO: 4314 - DNA, 42 bp, Thermothielavioides terrestris
  source 1..42: mol_type = other DNA
tggtgctccaccgaaggccagccctgcgacacggtcaagcgc

SEQ ID NO: 4315 - DNA, 45 bp, Thermothielavioides terrestris
  source 1..45: mol_type = other DNA
tggtgcaccttcttcctcggccagccctgctggaagaacaagcgg

SEQ ID NO: 4316 - DNA, 36 bp, Thermothielavioides terrestris
  source 1..36: mol_type = other DNA
tggtgcaccttcttcctcggccagccctgctggaag

SEQ ID NO: 4317 - DNA, 45 bp, Tothia fuscella
  source 1..45: mol_type = other DNA
acgcttggctttaccgcagggttggccacggcggaagcatctcca

SEQ ID NO: 4318 - DNA, 45 bp, Tothia fuscella
  source 1..45: mol_type = other DNA
acgcttgagtttaccgcagggttggccacgacggaagcatcgcca

SEQ ID NO: 4319 - DNA, 45 bp, Tothia fuscella
  source 1..45: mol_type = other DNA
gcgcttgaccttcccgcaaggttgtccacggcggaaacatctcca

SEQ ID NO: 4320 - DNA, 42 bp, Trichoderma arundinaceum
  source 1..42: mol_type = other DNA
tggtgctatcgcattggtgagccgtgctggaaggctaagcga

SEQ ID NO: 4321 - DNA, 42 bp, Trichoderma arundinaceum
  source 1..42: mol_type = other DNA
tggtgctaccgtatcggcgagccctgttggaaggtcaagcgc

SEQ ID NO: 4322 - DNA, 42 bp, Trichoderma arundinaceum
  source 1..42: mol_type = other DNA
tggtgctaccgcatcggccagccctgctggaaggccaagcgc

SEQ ID NO: 4323 - DNA, 42 bp, Trichoderma asperellum
  source 1..42: mol_type = other DNA
acgcttggccttccaacaagactcgccaacgcgccagcacca

SEQ ID NO: 4324 - DNA, 42 bp, Trichoderma asperellum
  source 1..42: mol_type = other DNA
acgcttagccttccagcaggactcgccaacacgccagcacca

SEQ ID NO: 4325 - DNA, 42 bp, Trichoderma atroviride
  source 1..42: mol_type = other DNA
acgcttggccttccagcaggactcgccgacacgccagcacca

SEQ ID NO: 4326 - DNA, 42 bp, Trichoderma citrinoviride
  source 1..42: mol_type = other DNA
gcgcttggtcttccagcactgtcttccgaggatgaagcacca

SEQ ID NO: 4327 - DNA, 42 bp, Trichoderma citrinoviride
  source 1..42: mol_type = other DNA
gcgcttggccttccagcagggctcaccgatgcggtagcacca

SEQ ID NO: 4328 - DNA, 42 bp, Trichoderma citrinoviride
  source 1..42: mol_type = other DNA
gcgcttgagcttccagcagggctcgccgattcggtagcacca

SEQ ID NO: 4329 - DNA, 42 bp, Trichoderma citrinoviride
  source 1..42: mol_type = other DNA
gcgcttggccttccagcaaggctggccaatgcggtagcacca

SEQ ID NO: 4330 - DNA, 42 bp, Trichoderma gamsii
  source 1..42: mol_type = other DNA
tggtgctggagagtcggcgagtcttgctggaaggccaagcga

SEQ ID NO: 4331 - DNA, 42 bp, Trichoderma gamsii; identical to SEQ ID NO: 4325
  source 1..42: mol_type = other DNA

SEQ ID NO: 4332 - DNA, 39 bp, Trichoderma guizhouense
  source 1..39: mol_type = other DNA
acgcttggccttctggcagtctccgccgttctggaagca

SEQ ID NO: 4333 - DNA, 42 bp, Trichoderma guizhouense
  source 1..42: mol_type = other DNA
gcgctgagccttccagcagggctggccaacgctgttgcacat

SEQ ID NO: 4334 - DNA, 42 bp, Trichoderma guizhouense
  source 1..42: mol_type = other DNA
tcgcttgggaatccagcaaccctctccgatgcggtagcacca

SEQ ID NO: 4335 - DNA, 42 bp, Trichoderma guizhouense
  source 1..42: mol_type = other DNA
tctcttggggatccagcaaggcgttccgatgcggtagcacca

SEQ ID NO: 4336 - DNA, 42 bp, Trichoderma guizhouense
  source 1..42: mol_type = other DNA
tcgcttgggaatccagcaaccctctccgacgcggtagcacca

SEQ ID NO: 4337 - DNA, 42 bp, Trichoderma harzianum
  source 1..42: mol_type = other DNA
atgtgcaacagcgttggccagccctgctggaaggctgagcgc

SEQ ID NO: 4338 - DNA, 42 bp, Trichoderma harzianum
  source 1..42: mol_type = other DNA
tggtgctacttactgggaatgccttgctggatccccaagaga

SEQ ID NO: 4339 - DNA, 42 bp, Trichoderma harzianum
  source 1..42: mol_type = other DNA
tggtgctaccgcatcggagagagctgctggatccccaagcga

SEQ ID NO: 4340 - DNA, 39 bp, Trichoderma harzianum; identical to SEQ ID NO: 4332
  source 1..39: mol_type = other DNA

SEQ ID NO: 4341 - DNA, 42 bp, Trichoderma harzianum
  source 1..42: mol_type = other DNA
gcgttgggccttccagcagggctggccgacgctgttgcacat

SEQ ID NO: 4342 - DNA, 42 bp, Trichoderma harzianum
  source 1..42: mol_type = other DNA
tcgcttggggacccagcaaggctcgccagggcggtagcacca

SEQ ID NO: 4343 - DNA, 42 bp, Trichoderma harzianum
  source 1..42: mol_type = other DNA
tctcttggggatccagcaaggcattccgacgcggtagcacca

SEQ ID NO: 4344 - DNA, 39 bp, Trichoderma harzianum
  source 1..39: mol_type = other DNA
acgcttggccttccagcagtctccgccgttctggaagca

SEQ ID NO: 4345 - DNA, 42 bp, Trichoderma harzianum
  source 1..42: mol_type = other DNA
acgcttgatcttccagcagggctcgccgatgcggtagcacca

SEQ ID NO: 4346 - DNA, 42 bp, Trichoderma harzianum
  source 1..42: mol_type = other DNA
tcgcttgggaatccagcaaggcattccgatgcggtagcacca

SEQ ID NO: 4347 - DNA, 42 bp, Trichoderma harzianum; identical to SEQ ID NO: 4329
  source 1..42: mol_type = other DNA

SEQ ID NO: 4348 - DNA, 39 bp, Trichoderma harzianum
  source 1..39: mol_type = other DNA
tgcttccagaacggcggagactgccagaaggccaagcgt

SEQ ID NO: 4349 - DNA, 42 bp, Trichoderma harzianum
  source 1..42: mol_type = other DNA
atgtgcaacagcgtcggccagccctgctggaaggcccaacgc

SEQ ID NO: 4350 - DNA, 42 bp, Trichoderma harzianum
  source 1..42: mol_type = other DNA
tggtgctaccgccctggcgagccttgctgggtccccaagcga

SEQ ID NO: 4351 - DNA, 42 bp, Trichoderma lentiforme
  source 1..42: mol_type = other DNA
gcgctcagccttccagcagggctggccaacgctgttgcacat

SEQ ID NO: 4352 - DNA, 42 bp, Trichoderma lentiforme
  source 1..42: mol_type = other DNA
tcgcttgggaacccagcaagacattccgatgcggtagcacca

SEQ ID NO: 4353 - DNA, 42 bp, Trichoderma lentiforme
  source 1..42: mol_type = other DNA
tctcttggggacccagcaaggcattcccaggcggtagcacca

SEQ ID NO: 4354 - DNA, 42 bp, Trichoderma lentiforme; identical to SEQ ID NO: 4342
  source 1..42: mol_type = other DNA

SEQ ID NO: 4355 - DNA, 42 bp, Trichoderma longibrachiatum
  source 1..42: mol_type = other DNA
tggtgctaccgcatcggcgagccctgctggaaggccaagcgc

SEQ ID NO: 4356 - DNA, 42 bp, Trichoderma longibrachiatum
  source 1..42: mol_type = other DNA
tggtgctaccgcatcggcgagccctgctggaagatcaagcgc

SEQ ID NO: 4357 - DNA, 42 bp, Trichoderma longibrachiatum
  source 1..42: mol_type = other DNA
tggtgctaccgtgttggacagccttgctggaaggccaagcgc

SEQ ID NO: 4358 - DNA, 42 bp, Trichoderma parareesei
  source 1..42: mol_type = other DNA
gcgcttggtcttccagcactttcctccgaggatccagcacca

SEQ ID NO: 4359 - DNA, 42 bp, Trichoderma parareesei
  source 1..42: mol_type = other DNA
gcgcttggccttccagcaaggctcgccgatgcggtagcacca

SEQ ID NO: 4360 - DNA, 42 bp, Trichoderma parareesei
  source 1..42: mol_type = other DNA
gcgcttgagcttccagcagggctcgccgatgcggtagcacca

SEQ ID NO: 4361 - DNA, 42 bp, Trichoderma reesei; identical to SEQ ID NO: 4358
  source 1..42: mol_type = other DNA

SEQ ID NO: 4362 - DNA, 42 bp, Trichoderma reesei; identical to SEQ ID NO: 4359
  source 1..42: mol_type = other DNA

SEQ ID NO: 4363 - DNA, 42 bp, Trichoderma reesei; identical to SEQ ID NO: 4360
  source 1..42: mol_type = other DNA

SEQ ID NO: 4364 - DNA, 42 bp, Trichoderma reesei
  source 1..42: mol_type = other DNA
tggtgctggatcctcggaggaaagtgctggaagaccaagcgc

SEQ ID NO: 4365 - DNA, 42 bp, Trichoderma reesei; identical to SEQ ID NO: 4355
  source 1..42: mol_type = other DNA

SEQ ID NO: 4366 - DNA, 42 bp, Trichoderma reesei
  source 1..42: mol_type = other DNA
tggtgctaccgcatcggcgagccctgctggaagctcaagcgc

SEQ ID NO: 4367 - DNA, 39 bp, Trichoderma virens
  source 1..39: mol_type = other DNA
tgcaaccaaatcggccagccttgttggaaggtcaagcgt

SEQ ID NO: 4368 - DNA, 42 bp, Trichoderma virens
  source 1..42: mol_type = other DNA
tggtgctaccaaaccggccagccttgctggaaggccaagcgc

SEQ ID NO: 4369 - DNA, 45 bp, Trichoderma virens
  source 1..45: mol_type = other DNA
tggtgctaccgcgtcggtatgacttgcggctggaagaagaagcga

SEQ ID NO: 4370 - DNA, 45 bp, Trichoderma virens
  source 1..45: mol_type = other DNA
tggtgctaccgcgtcggtatgacttgcggctggaagaacaagcga

SEQ ID NO: 4371 - DNA, 33 bp, Ustilaginoidea virens
  source 1..33: mol_type = other DNA
tggtgcgaccgcccaggggagccatgctggaag

SEQ ID NO: 4372 - DNA, 42 bp, Ustilaginoidea virens
  source 1..42: mol_type = other DNA
tggtgcgaccgcccaggggagccatgctggaaggtcaagaga

SEQ ID NO: 4373 - DNA, 42 bp, Ustilaginoidea virens
  source 1..42: mol_type = other DNA
tggtgcgatcgtcccgggcaaccatgctggaaagtcaagaga

SEQ ID NO: 4374 - DNA, 42 bp, Ustilaginoidea virens
  source 1..42: mol_type = other DNA
tggtgctggcgacccggtgaaccctgctggaaagtaaagaga

SEQ ID NO: 4375 - DNA, 42 bp, Ustilaginoidea virens
  source 1..42: mol_type = other DNA
tggtgctggcgtccgggtcagccgtgctggaaggccaagcgt

SEQ ID NO: 4376 - DNA, 33 bp, Ustilaginoidea virens
  source 1..33: mol_type = other DNA
cttccagcatggctcccctgggcggtcgcacca

SEQ ID NO: 4377 - DNA, 33 bp, Ustilaginoidea virens
  source 1..33: mol_type = other DNA
cttccagcatggctctccgggccggtcgcacca

SEQ ID NO: 4378 - DNA, 42 bp, Ustilaginoidea virens
  source 1..42: mol_type = other DNA
tctcttgactttccagcatggttgcccgggacgatcgcacca

SEQ ID NO: 4379 - DNA, 42 bp, Ustilaginoidea virens
  source 1..42: mol_type = other DNA
tctctttactttccagcagggttcaccgggtcgccagcacca

SEQ ID NO: 4380 - DNA, 42 bp, Ustilaginoidea virens
  source 1..42: mol_type = other DNA
acgcttggccttccagcacggctgacccggacgccagcacca

SEQ ID NO: 4381 - DNA, 42 bp, Valsa malicola
  source 1..42: mol_type = other DNA
tcgtgcgagcagcccggcgaggcgtgcaacaaggcgcgccgc

SEQ ID NO: 4382 - DNA, 36 bp, Valsa malicola
  source 1..36: mol_type = other DNA
tggtgcctgctcaagggccaaggctgctggaagcgt

SEQ ID NO: 4383 - DNA, 42 bp, Valsa malicola
  source 1..42: mol_type = other DNA
tggtgcctgatgaagggccagggctgctggaaggtcaagcgt

SEQ ID NO: 4384 - DNA, 42 bp, Valsa mali
  source 1..42: mol_type = other DNA
gcggcgcgccttgtagcaggcctcgccgggctgctcgcagga

SEQ ID NO: 4385 - DNA, 36 bp, Valsa mali
  source 1..36: mol_type = other DNA
ccgcttccagcagccctcgcccttgaacaggcacca

SEQ ID NO: 4386 - DNA, 42 bp, Valsa mali
  source 1..42: mol_type = other DNA
acgcttaaccttccagcagccctcgcccttgaacaggcacca

SEQ ID NO: 4387 - DNA, 39 bp, Valsa mali
  source 1..39: mol_type = other DNA
tgcgagcagcccggcgaggcctgctacaaggcgcgccgc

SEQ ID NO: 4388 - DNA, 36 bp, Valsa mali
  source 1..36: mol_type = other DNA
tggtgcctcttcaagggcgagggctgctggaagcgc

SEQ ID NO: 4389 - DNA, 33 bp, Valsa mali
  source 1..33: mol_type = other DNA
tggtgcctcttcaagggcgagggctgctggaag

SEQ ID NO: 4390 - DNA, 51 bp, Valsa sordida
  source 1..51: mol_type = other DNA
ttctgccccttcggcggcgaggccggcagcacgtgctacgcctccaagcgc

SEQ ID NO: 4391 - DNA, 36 bp, Valsa sordida
  source 1..36: mol_type = other DNA
tggtgcctcctcaagggccagggctgctggaagcgc

SEQ ID NO: 4392 - DNA, 33 bp, Valsa sordida
  source 1..33: mol_type = other DNA
tggtgcctcctcaagggccagggctgctggaag

SEQ ID NO: 4393 - DNA, 30 bp, Venustampulla echinocandica
  source 1..30: mol_type = other DNA
cttccagcagccttgtccaacgtgggtgca

SEQ ID NO: 4394 - DNA, 36 bp, Venustampulla echinocandica
  source 1..36: mol_type = other DNA
cttctccttccagcagccctggccaacatgggtaca

SEQ ID NO: 4395 - DNA, 30 bp, Venustampulla echinocandica
  source 1..30: mol_type = other DNA
cttccagcagccttggccgacgtgggtgca

SEQ ID NO: 4396 - DNA, 39 bp, Verticillium alfalfae
  source 1..39: mol_type = other DNA
acgcttggccttccagcagccctgtccgggacgggggca

SEQ ID NO: 4397 - DNA, 39 bp, Verticillium alfalfae
  source 1..39: mol_type = other DNA
gcgcttgttcttccagcagccctgtccaggtcgggggca

SEQ ID NO: 4398 - DNA, 39 bp, Verticillium dahliae
  source 1..39: mol_type = other DNA
tgcccccgacctggacagggctgctggaaggccaagcgt

SEQ ID NO: 4399 - DNA, 39 bp, Verticillium dahliae
  source 1..39: mol_type = other DNA
tgcccccgacctggacagggttgctggaagaacaagcgc

SEQ ID NO: 4400 - DNA, 39 bp, Verticillium dahliae; identical to SEQ ID NO: 4398
  source 1..39: mol_type = other DNA

SEQ ID NO: 4401 - DNA, 39 bp, Verticillium dahliae; identical to SEQ ID NO: 4399
  source 1..39: mol_type = other DNA

SEQ ID NO: 4402 - DNA, 39 bp, Verticillium dahliae; identical to SEQ ID NO: 4398
  source 1..39: mol_type = other DNA

SEQ ID NO: 4403 - DNA, 39 bp, Verticillium dahliae; identical to SEQ ID NO: 4399
  source 1..39: mol_type = other DNA

SEQ ID NO: 4404 - DNA, 39 bp, Verticillium dahliae; identical to SEQ ID NO: 4398
  source 1..39: mol_type = other DNA

SEQ ID NO: 4405 - DNA, 39 bp, Verticillium dahliae; identical to SEQ ID NO: 4399
  source 1..39: mol_type = other DNA

SEQ ID NO: 4406 - DNA, 39 bp, Verticillium dahliae; identical to SEQ ID NO: 4398
  source 1..39: mol_type = other DNA

SEQ ID NO: 4407 - DNA, 39 bp, Verticillium dahliae; identical to SEQ ID NO: 4399
  source 1..39: mol_type = other DNA

SEQ ID NO: 4408 - DNA, 39 bp, Verticillium dahliae
  source 1..39: mol_type = other DNA
acgcttggccttccagcagccctggccaggtcgggggca

SEQ ID NO: 4409 - DNA, 39 bp, Verticillium dahliae
  source 1..39: mol_type = other DNA
gcgcttgttcttccagcaaccctgtccaggtcgggggca

SEQ ID NO: 4410 - DNA, 39 bp, Verticillium dahliae; identical to SEQ ID NO: 4408
  source 1..39: mol_type = other DNA

SEQ ID NO: 4411 - DNA, 39 bp, Verticillium dahliae; identical to SEQ ID NO: 4409
  source 1..39: mol_type = other DNA

SEQ ID NO: 4412 - DNA, 39 bp, Verticillium dahliae
  source 1..39: mol_type = other DNA
tgcccccgacctggccagggctgctggaaggccaagcgt

SEQ ID NO: 4413 - DNA, 39 bp, Verticillium dahliae; identical to SEQ ID NO: 4399
  source 1..39: mol_type = other DNA

SEQ ID NO: 4414 - DNA, 39 bp, Verticillium dahliae; identical to SEQ ID NO: 4408
  source 1..39: mol_type = other DNA

SEQ ID NO: 4415 - DNA, 39 bp, Verticillium dahliae; identical to SEQ ID NO: 4409
  source 1..39: mol_type = other DNA

SEQ ID NO: 4416 - DNA, 39 bp, Verticillium dahliae; identical to SEQ ID NO: 4408
  source 1..39: mol_type = other DNA

SEQ ID NO: 4417 - DNA, 39 bp, Verticillium dahliae; identical to SEQ ID NO: 4409
  source 1..39: mol_type = other DNA

SEQ ID NO: 4418 - DNA, 39 bp, Verticillium longisporum; identical to SEQ ID NO: 4397
  source 1..39: mol_type = other DNA

SEQ ID NO: 4419 - DNA, 39 bp, Verticillium longisporum
  source 1..39: mol_type = other DNA
tcgcttgttcttccagcagccctgtccaggtcgggggca

SEQ ID NO: 4420 - DNA, 39 bp, Verticillium longisporum
  source 1..39: mol_type = other DNA
acgcttggccttccagcaaccctgtccaggtcgggagca

SEQ ID NO: 4421 - DNA, 39 bp, Verticillium longisporum
  source 1..39: mol_type = other DNA
gcgcttgttcttccagcacccctggccagggcgagagca

SEQ ID NO: 4422 - DNA, 39 bp, Verticillium longisporum
  source 1..39: mol_type = other DNA
tgcccccgacctggacagggctgctggaagaacaagcga

SEQ ID NO: 4423 - DNA, 39 bp, Verticillium longisporum
  source 1..39: mol_type = other DNA
tgctcacgccccggacagggttgctggaaggccaagcgt

SEQ ID NO: 4424 - DNA, 39 bp, Verticillium longisporum
  source 1..39: mol_type = other DNA
tgctctcgccctggccaggggtgctggaagaacaagcgc

SEQ ID NO: 4425 - DNA, 39 bp, Verticillium nonalfalfae
  source 1..39: mol_type = other DNA
acgcttggccttccagcagccctgtccaggacgggggca

SEQ ID NO: 4426 - DNA, 39 bp, Verticillium nonalfalfae; identical to SEQ ID NO: 4397
  source 1..39: mol_type = other DNA

SEQ ID NO: 4427 - DNA, 36 bp, Westerdykella ornata
  source 1..36: mol_type = other DNA
tgctggttccgcggccagccctgcaaggccaagcgt

SEQ ID NO: 4428 - DNA, 27 bp, Westerdykella ornata
  source 1..27: mol_type = other DNA
tgctggttccgcggccagccctgcaag

SEQ ID NO: 4429 - DNA, 39 bp, Westerdykella ornata
  source 1..39: mol_type = other DNA
tgctggttccgtgggcaaccctgccgcaagctcaagcgc

SEQ ID NO: 4430 - DNA, 39 bp, Westerdykella ornata
  source 1..39: mol_type = other DNA
tgctggttccgtggccagccctgctccaaggccaaacgc

SEQ ID NO: 4431 - DNA, 39 bp, Westerdykella ornata
  source 1..39: mol_type = other DNA
tgctggttccgtggtcagccatgctccaaggtcaagcgt

SEQ ID NO: 4432 - DNA, 42 bp, Xylona heveae
  source 1..42: mol_type = other DNA
acgcttggctttagagcatccctggcccggcagatggcagaa

SEQ ID NO: 4433 - DNA, 42 bp, Xylona heveae
  source 1..42: mol_type = other DNA
acgcttgagcttcgagcagccttgtccgggaagatggcagaa

SEQ ID NO: 4434 - DNA, 42 bp, Xylona heveae
  source 1..42: mol_type = other DNA
gcgcttgaccttagagcagccttggccgggaaggtgacagaa

SEQ ID NO: 4435 - DNA, 39 bp, Zasmidium cellare
  source 1..39: mol_type = other DNA
tgctccgagccaggtggtgactgtgatgttgccaagcgt

SEQ ID NO: 4436 - DNA, 42 bp, Zasmidium cellare
  source 1..42: mol_type = other DNA
ttctgcggtcttcccggagaagcttgctcccgagtcaagcgt

SEQ ID NO: 4437 - DNA, 42 bp, Zasmidium cellare
  source 1..42: mol_type = other DNA
ttctgcggtgtccccggcgaggcctgcgaggtcaccaagcgc

SEQ ID NO: 4438 - DNA, 42 bp, Zasmidium cellare
  source 1..42: mol_type = other DNA
tggaagtgcggcgtccccggccaagcctgcaacaagaagcgc

SEQ ID NO: 4439 - DNA, 42 bp, Zasmidium cellare
  source 1..42: mol_type = other DNA
tggaagtgtggtgtccctggccaagcctgcaacaggaagcgc

SEQ ID NO: 4440 - DNA, 42 bp, Zasmidium cellare
  source 1..42: mol_type = other DNA
tggaagtgcggtgtccgaggccaagcctgcaacaagaagaga

SEQ ID NO: 4441 - DNA, 42 bp, Zymoseptoria brevis
  source 1..42: mol_type = other DNA
tggtgcggtgccatcggcgccccctgtgccaaagccaagcgc

SEQ ID NO: 4442 - DNA, 42 bp, Zymoseptoria brevis
  source 1..42: mol_type = other DNA
tggtgcggtgccatcggcgctccttgtgccaaagacaagcgt

SEQ ID NO: 4443 - DNA, 33 bp, Zymoseptoria brevis
  source 1..33: mol_type = other DNA
tggtgcggtgccatcggcgccccctgtgccaaa

SEQ ID NO: 4444 - DNA, 42 bp, Zymoseptoria brevis
  source 1..42: mol_type = other DNA
tggtgcggtgccatcggtgccccatgcgccaaagtcaagcgt

SEQ ID NO: 4445 - DNA, 42 bp, Zymoseptoria brevis
  source 1..42: mol_type = other DNA
tggtgtggcgctatcggagcaccttgtgctcgcgtcaagcgt

SEQ ID NO: 4446 - DNA, 42 bp, Zymoseptoria brevis
  source 1..42: mol_type = other DNA
tggtgcggtgcccttggtgctccctgcgccaaagtcaagcgt

SEQ ID NO: 4447 - DNA, 33 bp, Zymoseptoria tritici
  source 1..33: mol_type = other DNA
cttggcgcaaggcgcaccaatggcaccgcacca

SEQ ID NO: 4448 - DNA, 42 bp, Zymoseptoria tritici
  source 1..42: mol_type = other DNA
acgcttgtctttggcacaaggagcgccgatggcaccgcacca

SEQ ID NO: 4449 - DNA, 36 bp, Zymoseptoria tritici
  source 1..36: mol_type = other DNA
gcgcttggcgcaaggcgcaccaatggcaccgcacca

SEQ ID NO: 4450 - DNA, 42 bp, Zymoseptoria tritici
  source 1..42: mol_type = other DNA
acgcttgactttggcgcatggggcaccgatggcaccgcacca

SEQ ID NO: 4451 - DNA, 42 bp, Zymoseptoria tritici
  source 1..42: mol_type = other DNA
acgcttgacgcgagcacaaggtgctccgatagcgccacacca

SEQ ID NO: 4452 - DNA, 42 bp, Zymoseptoria tritici
  source 1..42: mol_type = other DNA
acgcttgactttggcgcagggagcaccaagggcaccgcacca

SEQ ID NO: 4453 - DNA, 33 bp, Zymoseptoria tritici; identical to SEQ ID NO: 4447
  source 1..33: mol_type = other DNA

SEQ ID NO: 4454 - DNA, 42 bp, Zymoseptoria tritici; identical to SEQ ID NO: 4448
  source 1..42: mol_type = other DNA

SEQ ID NO: 4455 - DNA, 36 bp, Zymoseptoria tritici; identical to SEQ ID NO: 4449
  source 1..36: mol_type = other DNA

SEQ ID NO: 4456 - DNA, 42 bp, Zymoseptoria tritici; identical to SEQ ID NO: 4450
  source 1..42: mol_type = other DNA

SEQ ID NO: 4457 - DNA, 42 bp, Zymoseptoria tritici; identical to SEQ ID NO: 4451
  source 1..42: mol_type = other DNA

SEQ ID NO: 4458 - DNA, 42 bp, Zymoseptoria tritici; identical to SEQ ID NO: 4452
  source 1..42: mol_type = other DNA

SEQ ID NO: 4459 - DNA, 33 bp, Zymoseptoria tritici
  source 1..33: mol_type = other DNA
cttggcgcaaggcgcaccaattgcaccgcacca

SEQ ID NO: 4460 - DNA, 42 bp, Zymoseptoria tritici; identical to SEQ ID NO: 4448
  source 1..42: mol_type = other DNA

SEQ ID NO: 4461 - DNA, 36 bp, Zymoseptoria tritici
  source 1..36: mol_type = other DNA
gcgcttggcgcaaggcgcaccaattgcaccgcacca

SEQ ID NO: 4462 - DNA, 42 bp, Zymoseptoria tritici; identical to SEQ ID NO: 4450
  source 1..42: mol_type = other DNA

SEQ ID NO: 4463 - DNA, 42 bp, Zymoseptoria tritici; identical to SEQ ID NO: 4451
  source 1..42: mol_type = other DNA

SEQ ID NO: 4464 - DNA, 42 bp, Zymoseptoria tritici; identical to SEQ ID NO: 4452
  source 1..42: mol_type = other DNA

SEQ ID NO: 4465 - DNA, 33 bp, Zymoseptoria tritici; identical to SEQ ID NO: 4447
  source 1..33: mol_type = other DNA

SEQ ID NO: 4466 - DNA, 42 bp, Zymoseptoria tritici; identical to SEQ ID NO: 4448
  source 1..42: mol_type = other DNA

SEQ ID NO: 4467 - DNA, 36 bp, Zymoseptoria tritici; identical to SEQ ID NO: 4449
  source 1..36: mol_type = other DNA

SEQ ID NO: 4468 - DNA, 42 bp, Zymoseptoria tritici; identical to SEQ ID NO: 4450
  source 1..42: mol_type = other DNA

SEQ ID NO: 4469 - DNA, 42 bp, Zymoseptoria tritici; identical to SEQ ID NO: 4451
  source 1..42: mol_type = other DNA

SEQ ID NO: 4470 - DNA, 42 bp, Zymoseptoria tritici; identical to SEQ ID NO: 4452
  source 1..42: mol_type = other DNA

SEQ ID NO: 4471 - DNA, 33 bp, Botrytis fragariae; identical to SEQ ID NO: 3625
  source 1..33: mol_type = other DNA

SEQ ID NO: 4472 - DNA, 33 bp, Botrytis fragariae; identical to SEQ ID NO: 3625
  source 1..33: mol_type = other DNA

SEQ ID NO: 4473 - DNA, 33 bp, Botrytis galanthina
  source 1..33: mol_type = other DNA
acgcttacatggttgtccgggacgtccgcacca

SEQ ID NO: 4474 - DNA, 33 bp, Botrytis tulipae; identical to SEQ ID NO: 4473
  source 1..33: mol_type = other DNA

SEQ ID NO: 4475 - DNA, 39 bp, Pseudogymnoascus verrucosus
  source 1..39: mol_type = other DNA
acgcttagctttgccacatggctggccaggacgccagca

SEQ ID NO: 4476 - DNA, 42 bp, Pseudogymnoascus verrucosus
  source 1..42: mol_type = other DNA
acgcttagctttgccacatggctggccaggacgccagcagat

SEQ ID NO: 4477 - DNA, 24 bp, Pseudogymnoascus sp.
  source 1..24: mol_type = other DNA; note = 24MN13
acgcttagctttgccgcatggctg

SEQ ID NO: 4478 - DNA, 42 bp, Pseudogymnoascus sp.
  source 1..42: mol_type = other DNA; note = 24MN13
acgcttagctttgccgcatggctggccaggacgccagcagat

SEQ ID NO: 4479 - DNA, 36 bp, Diaporthe helianthi
  source 1..36: mol_type = other DNA
acgcttccagcagccctcgcccttccagaagcacca

SEQ ID NO: 4480 - DNA, 36 bp, Colletotrichum gloeosporioides; identical to SEQ ID NO: 3747
  source 1..36: mol_type = other DNA

SEQ ID NO: 4481 - DNA, 39 bp, Neurospora crassa
  source 1..39: mol_type = other DNA
acgcttcttccagcaggactggccgtggatgcggcacca

SEQ ID NO: 4482 - DNA, 39 bp, Neurospora crassa; identical to SEQ ID NO: 4481
  source 1..39: mol_type = other DNA

SEQ ID NO: 4483 - DNA, 42 bp, Lasiodiplodia theobromae
  source 1..42: mol_type = other DNA
acgcttcttgtggcaaggctggccgcggatgcggccgcagaa

SEQ ID NO: 4484 - DNA, 42 bp, Lasiodiplodia theobromae; identical to SEQ ID NO: 4483
  source 1..42: mol_type = other DNA

SEQ ID NO: 4485 - DNA, 42 bp, Botrytis fragariae; identical to SEQ ID NO: 3655
  source 1..42: mol_type = other DNA

SEQ ID NO: 4486 - DNA, 39 bp, Mollisia scopiformis
  source 1..39: mol_type = other DNA
acgcttgactttgccgcatggttgtcctgggtatccgca

SEQ ID NO: 4487 - DNA, 33 bp, Monilinia fructigena
  source 1..33: mol_type = other DNA
acgcttgcatccttgacctgggcgtccgcacca

SEQ ID NO: 4488 - DNA, 33 bp, Botrytis cinerea; identical to SEQ ID NO: 3627
  source 1..33: mol_type = other DNA

SEQ ID NO: 4489 - DNA, 33 bp, Botrytis cinerea; identical to SEQ ID NO: 3627
  source 1..33: mol_type = other DNA

SEQ ID NO: 4490 - DNA, 33 bp, Botrytis cinerea; identical to SEQ ID NO: 3627
  source 1..33: mol_type = other DNA

SEQ ID NO: 4491 - DNA, 42 bp, Coniochaeta pulveracea
  source 1..42: mol_type = other DNA
acgcttggacttccagcatggctggcctttgaaggggcacca

SEQ ID NO: 4492 - DNA, 42 bp, Aspergillus mulundensis
  source 1..42: mol_type = other DNA
acgcttggacttgtggcagacctgtccgggccacctgcacca

SEQ ID NO: 4493 - DNA, 33 bp, Lindgomyces ingoldianus
  source 1..33: mol_type = other DNA
acgcttggagcatggctgaccaacgagacggca

SEQ ID NO: 4494 - DNA, 36 bp, Lindgomyces ingoldianus
  source 1..36: mol_type = other DNA
acgcttggagcatggctgaccaacgagacggcagcg

SEQ ID NO: 4495 - DNA, 39 bp, Verticillium longisporum
  source 1..39: mol_type = other DNA
acgcttggccttccagcaaccctgtccggggcgtgagca

SEQ ID NO: 4496 - DNA, 39 bp, Verticillium dahliae
  source 1..39: mol_type = other DNA
acgcttggccttccagcagccctgtccaggtcgggggca

SEQ ID NO: 4497 - DNA, 39 bp, Verticillium dahliae; identical to SEQ ID NO: 4496
  source 1..39: mol_type = other DNA

SEQ ID NO: 4498 - DNA, 42 bp, Trichoderma asperellum
  source 1..42: mol_type = other DNA
acgcttggccttccagcaggactcgccaacacgccagcacca

SEQ ID NO: 4499 - DNA, 42 bp, Trichoderma asperellum
  source 1..42: mol_type = other DNA
acgcttggccttccagcaggactcgccaacgcgccagcacca

SEQ ID NO: 4500 - DNA, 39 bp, Pseudogymnoascus sp.
  source 1..39: mol_type = other DNA; note = VKM F-4514 (FW-929)
acgcttggccttgccacatggttgacctggacgccagca

SEQ ID NO: 4501 - DNA, 42 bp, Pseudogymnoascus sp.
  source 1..42: mol_type = other DNA; note = VKM F-4514 (FW-929)
acgcttggccttgccacatggttgacctggacgccagcagat

SEQ ID NO: 4502 - DNA, 42 bp, Pseudogymnoascus sp.
  source 1..42: mol_type = other DNA; note = 23342-1-I1
acgcttggccttgccgcatggctgaccggggcgccagcagaa

SEQ ID NO: 4503 - DNA, 39 bp, Helotiales sp.
  source 1..39: mol_type = other DNA; note = DMI_Dod_QoI
acgcttggcctttccacaaggttgtccggggtatccaca

SEQ ID NO: 4504 - DNA, 39 bp, Marssonina coronariae
  source 1..39: mol_type = other DNA
acgcttggcctttccgcaaggttgccctggctttccgca

SEQ ID NO: 4505 - DNA, 39 bp, Mollisia scopiformis
  source 1..39: mol_type = other DNA
acgcttggcctttccgcacggttgtcctgggtatccgca

SEQ ID NO: 4506 - DNA, 42 bp, Pseudogymnoascus sp.
  source 1..42: mol_type = other DNA; note = VKM F-4517 (FW-2822)
acgcttggcctttccgcatggctgaccggggcgccagcagta

SEQ ID NO: 4507 - DNA, 39 bp, Pseudogymnoascus sp.
  source 1..39: mol_type = other DNA; note = VKM F-4246
acgcttggctttgccacatggttgaccggggagccagca

SEQ ID NO: 4508 - DNA, 39 bp, Pseudogymnoascus sp.; identical to SEQ ID NO: 4507
  source 1..39: mol_type = other DNA; note = VKM F-4513 (FW-928)

SEQ ID NO: 4509 - DNA, 42 bp, Lophiostoma macrostomum
  source 1..42: mol_type = other DNA
acgcttggctttgccgcaaggttgtccgcggtagtggcagaa

SEQ ID NO: 4510 - DNA, 39 bp, Pseudogymnoascus sp.
  source 1..39: mol_type = other DNA; note = VKM F-3775
acgcttggctttgccgcatggctggccggggcgccagca

SEQ ID NO: 4511 - DNA, 42 bp, Metarhizium anisopliae; identical to SEQ ID NO: 3970
  source 1..42: mol_type = other DNA

SEQ ID NO: 4512 - DNA, 42 bp, Metarhizium anisopliae; identical to SEQ ID NO: 3970
  source 1..42: mol_type = other DNA

SEQ ID NO: 4513 - DNA, 42 bp, Metarhizium anisopliae; identical to SEQ ID NO: 3970
  source 1..42: mol_type = other DNA

SEQ ID NO: 4514 - DNA, 42 bp, Metarhizium anisopliae; identical to SEQ ID NO: 3970
  source 1..42: mol_type = other DNA

SEQ ID NO: 4515 - DNA, 39 bp, Lophium mytilinum
  source 1..39: mol_type = other DNA
acgcttttccttggagcaagattgacctgggagatggca

SEQ ID NO: 4516 - DNA, 30 bp, Botrytis fragariae
  source 1..30: mol_type = other DNA
acggcaaggttgtccgggacgtccgcacca

SEQ ID NO: 4517 - DNA, 33 bp, Botryotinia narcissicola
  source 1..33: mol_type = other DNA
acgtttacatggttgaccggggcgtccgcacca

SEQ ID NO: 4518 - DNA, 33 bp, Botrytis cinerea
  source 1..33: mol_type = other DNA
acgtttacatggttgtccggggcgtccacacca

SEQ ID NO: 4519 - DNA, 33 bp, Botrytis cinerea; identical to SEQ ID NO: 4518
  source 1..33: mol_type = other DNA

SEQ ID NO: 4520 - DNA, 33 bp, Botrytis cinerea; identical to SEQ ID NO: 4518
  source 1..33: mol_type = other DNA

SEQ ID NO: 4521 - DNA, 33 bp, Sclerotinia sclerotiorum
  source 1..33: mol_type = other DNA
acgtttgcagggttgtccggggcgtccgcacca

SEQ ID NO: 4522 - DNA, 33 bp, Botrytis cinerea
  source 1..33: mol_type = other DNA
acgtttgcagggttgtcctgggcgtccacacca

SEQ ID NO: 4523 - DNA, 33 bp, Botrytis cinerea; identical to SEQ ID NO: 4522
  source 1..33: mol_type = other DNA

SEQ ID NO: 4524 - DNA, 33 bp, Botrytis cinerea; identical to SEQ ID NO: 4522
  source 1..33: mol_type = other DNA

SEQ ID NO: 4525 - DNA, 33 bp, Monilinia fructicola
  source 1..33: mol_type = other DNA
acgtttgcatccttgaccagggcgtccgcacca

SEQ ID NO: 4526 - DNA, 30 bp, Delitschia confertaspora; identical to SEQ ID NO: 3796
  source 1..30: mol_type = other DNA

SEQ ID NO: 4527 - DNA, 27 bp, Lindgomyces ingoldianus
  source 1..27: mol_type = other DNA
agagcatggctggccgacgaggcggca

SEQ ID NO: 4528 - DNA, 27 bp, Lindgomyces ingoldianus
  source 1..27: mol_type = other DNA
agagcatggctggccgacgaggcggca

SEQ ID NO: 4529 - DNA, 36 bp, Dothistroma septosporum
  source 1..36: mol_type = other DNA
aggtgcaccgttccgggtctcgcatgcggtaagcgt

SEQ ID NO: 4530 - DNA, 42 bp, Pseudogymnoascus sp.
  source 1..42: mol_type = other DNA; note = VKM F-4519 (FW-2642)
atctgctggcgtccaggccagccgtgcggaaaagccaagcgc

SEQ ID NO: 4531 - DNA, 42 bp, Pseudogymnoascus sp.
  source 1..42: mol_type = other DNA; note = VKM F-103
atctgctggcgtccaggccagccgtgcggcaaagccaagcgc

SEQ ID NO: 4532 - DNA, 42 bp, Pseudogymnoascus sp.
  source 1..42: mol_type = other DNA; note = VKM F-3557
atctgctggcgtccaggtcaaccatgtggcaaggccaagcgt

SEQ ID NO: 4533 - DNA, 42 bp, Pseudogymnoascus sp.; identical to SEQ ID NO: 4532
  source 1..42: mol_type = other DNA; note = VKM F-4516 (FW-969)

SEQ ID NO: 4534 - DNA, 42 bp, Pseudogymnoascus sp.
  source 1..42: mol_type = other DNA; note = WSF 3629
atctgctggcgtcctggccagccatgtggcaaagctaagcgt

SEQ ID NO: 4535 - DNA, 42 bp, Pseudogymnoascus sp.
  source 1..42: mol_type = other DNA; note = 03VT05
atctgctggcgtcctggccagccatgtggtaaagctaagcgt

SEQ ID NO: 4536 - DNA, 42 bp, Pseudogymnoascus sp.
  source 1..42: mol_type = other DNA; note = 05NY08
atctgctggcgtcctggtcagccatgcggaaaagctaagcgt

SEQ ID NO: 4537 - DNA, 30 bp, Stachybotrys chlorohalonata; identical to SEQ ID NO: 4309
  source 1..30: mol_type = other DNA

SEQ ID NO: 4538 - DNA, 30 bp, Stachybotrys chartarum; identical to SEQ ID NO: 4300
  source 1..30: mol_type = other DNA

SEQ ID NO: 4539 - DNA, 30 bp, Stachybotrys chartarum; identical to SEQ ID NO: 4300
  source 1..30: mol_type = other DNA

SEQ ID NO: 4540 - DNA, 30 bp, Stachybotrys chlorohalonata; identical to SEQ ID NO: 4300
  source 1..30: mol_type = other DNA

SEQ ID NO: 4541 - DNA, 36 bp, Cryphonectria parasitica
  source 1..36: mol_type = other DNA
ccgcttccagcacccttcgccgtggaacaggcacca

SEQ ID NO: 4542 - DNA, 42 bp, Coniochaeta pulveracea
  source 1..42: mol_type = other DNA
ccgcttgttcttccagcatggttggccgggatgggggcacca

SEQ ID NO: 4543 - DNA, 36 bp, Colletotrichum fructicola; identical to SEQ ID NO: 3744
  source 1..36: mol_type = other DNA

SEQ ID NO: 4544 - DNA, 36 bp, Colletotrichum fructicola; identical to SEQ ID NO: 3744
  source 1..36: mol_type = other DNA

SEQ ID NO: 4545 - DNA, 36 bp, Colletotrichum fructicola; identical to SEQ ID NO: 3744
  source 1..36: mol_type = other DNA

SEQ ID NO: 4546 - DNA, 36 bp, Colletotrichum siamense; identical to SEQ ID NO: 3744
  source 1..36: mol_type = other DNA

SEQ ID NO: 4547 - DNA, 36 bp, Colletotrichum siamense; identical to SEQ ID NO: 3744
  source 1..36: mol_type = other DNA

SEQ ID NO: 4548 - DNA, 42 bp, Ophiocordyceps camponoti-floridani; identical to SEQ ID NO: 4056
  source 1..42: mol_type = other DNA

SEQ ID NO: 4549 - DNA, 42 bp, Ophiocordyceps camponoti-floridani
  source 1..42: mol_type = other DNA
cctcttcttggggccacactgcgagttgggacgtgtgcacca

SEQ ID NO: 4550 - DNA, 42 bp, Ophiocordyceps camponoti-floridani; identical to SEQ ID NO: 4549
  source 1..42: mol_type = other DNA

SEQ ID NO: 4551 - DNA, 42 bp, Ophiocordyceps camponoti-floridani; identical to SEQ ID NO: 4549
  source 1..42: mol_type = other DNA

SEQ ID NO: 4552 - DNA, 42 bp, Ophiocordyceps camponoti-rufipedis
  source 1..42: mol_type = other DNA
cctcttgaccttggagcagatggagttgggacgcttgcacca

SEQ ID NO: 4553 - DNA, 30 bp, Botrytis cinerea
  source 1..30: mol_type = other DNA
cttacatggctgtcctgggcgtccgcacca

SEQ ID NO: 4554 - DNA, 30 bp, Botrytis cinerea; identical to SEQ ID NO: 4553
  source 1..30: mol_type = other DNA

SEQ ID NO: 4555 - DNA, 30 bp, Botrytis cinerea; identical to SEQ ID NO: 4553
  source 1..30: mol_type = other DNA

SEQ ID NO: 4556 - DNA, 30 bp, Botrytis fragariae
  source 1..30: mol_type = other DNA
cttacatggttgaccagggcgtccacacca

SEQ ID NO: 4557 - DNA, 30 bp, Botryotinia narcissicola
  source 1..30: mol_type = other DNA
cttacatggttgaccgggacgtccgcacca

SEQ ID NO: 4558 - DNA, 30 bp, Botrytis galanthina
  source 1..30: mol_type = other DNA
cttacatggttgtccgggacgtccacacca

SEQ ID NO: 4559 - DNA, 30 bp, Botrytis tulipae; identical to SEQ ID NO: 4558
  source 1..30: mol_type = other DNA

SEQ ID NO: 4560 - DNA, 33 bp, Cryphonectria parasitica; identical to SEQ ID NO: 3792
  source 1..33: mol_type = other DNA

SEQ ID NO: 4561 - DNA, 33 bp, Metarhizium rileyi
  source 1..33: mol_type = other DNA
cttccagcaaggctgtcccggtcgccaacacca

SEQ ID NO: 4562 - DNA, 33 bp, Metarhizium rileyi; identical to SEQ ID NO: 4561
  source 1..33: mol_type = other DNA

SEQ ID NO: 4563 - DNA, 33 bp, Diaporthe helianthi
  source 1..33: mol_type = other DNA
cttccagcacccctcgcccttccagaagcacca

SEQ ID NO: 4564 - DNA, 33 bp, Valsa mali
  source 1..33: mol_type = other DNA
cttccagcacccttcacccttgaacaggcacca

SEQ ID NO: 4565 - DNA, 33 bp, Cryphonectria parasitica
  source 1..33: mol_type = other DNA
cttccagcacccttcgccgtggaacaggcacca

SEQ ID NO: 4566 - DNA, 33 bp, Neurospora crassa; identical to SEQ ID NO: 4036
  source 1..33: mol_type = other DNA

SEQ ID NO: 4567 - DNA, 33 bp, Neurospora crassa; identical to SEQ ID NO: 4036
  source 1..33: mol_type = other DNA

SEQ ID NO: 4568 - DNA, 33 bp, Sporothrix brasiliensis
  source 1..33: mol_type = other DNA
cttccagcacgactggcctttgagggggcagta

SEQ ID NO: 4569 - DNA, 33 bp, Neurospora crassa
  source 1..33: mol_type = other DNA
cttccagcacgattggccgtggatgcggcacca

SEQ ID NO: 4570 - DNA, 33 bp, Neurospora crassa; identical to SEQ ID NO: 4569
  source 1..33: mol_type = other DNA

SEQ ID NO: 4571 - DNA, 33 bp, Pyricularia sp.
  source 1..33: mol_type = other DNA; note = CBS 133598
cttccagcacggctgcccacggcgcgggcacca

SEQ ID NO: 4572 - DNA, 33 bp, Pyricularia grisea
  source 1..33: mol_type = other DNA
cttccagcacggctggccccggcgtgggcacca

SEQ ID NO: 4573 - DNA, 33 bp, Valsa mali
  source 1..33: mol_type = other DNA
cttccagcagccctcgcccttgaacaggcacca

SEQ ID NO: 4574 - DNA, 33 bp, Drechmeria coniospora
  source 1..33: mol_type = other DNA
cttccagcagccgctgccgggacgagtgcacca

SEQ ID NO: 4575 - DNA, 30 bp, Venustampulla echinocandica
  source 1..30: mol_type = other DNA
cttccagcagccttgtccgacgtgggtgca

SEQ ID NO: 4576 - DNA, 33 bp, Neurospora crassa
  source 1..33: mol_type = other DNA
cttccagcaggactggccatggatccggcacca

SEQ ID NO: 4577 - DNA, 33 bp, Neurospora crassa; identical to SEQ ID NO: 4576
  source 1..33: mol_type = other DNA

SEQ ID NO: 4578 - DNA, 33 bp, Pyricularia oryzae
  source 1..33: mol_type = other DNA
cttccagcagggctggccgcgacgcgggcacca

SEQ ID NO: 4579 - DNA, 33 bp, Pyricularia oryzae
  source 1..33: mol_type = other DNA
cttccagcagggctggccgcgccgggggcacca

SEQ ID NO: 4580 - DNA, 33 bp, Pyricularia grisea
  source 1..33: mol_type = other DNA
cttccagcagggctggccgcggcggggacacca

SEQ ID NO: 4581 - DNA, 33 bp, Pyricularia sp.
  source 1..33: mol_type = other DNA; note = CBS 133598
cttccagcagggctggccgcggcgggggcacca

SEQ ID NO: 4582 - DNA, 33 bp, Drechmeria coniospora; identical to SEQ ID NO: 3822
  source 1..33: mol_type = other DNA

SEQ ID NO: 4583 - DNA, 30 bp, Venustampulla echinocandica
  source 1..30: mol_type = other DNA
cttccagcatccttggccaacatgggtaca

SEQ ID NO: 4584 - DNA, 36 bp, Venustampulla echinocandica
  source 1..36: mol_type = other DNA
cttctccttccagcagccctggccgacgtgagtgca

SEQ ID NO: 4585 - DNA, 36 bp, Helotiales sp.
  source 1..36: mol_type = other DNA; note = DMI_Dod_QoI
cttgactttgccacatggctggccggggtagccaca

SEQ ID NO: 4586 - DNA, 30 bp, Rutstroemia sp.
  source 1..30: mol_type = other DNA; note = NJR-2017a WRK4
cttgcacggttgtccgggacggccgcacca

SEQ ID NO: 4587 - DNA, 30 bp, Sclerotinia sclerotiorum
  source 1..30: mol_type = other DNA
cttgcatggttgaccgggacgtccgcacca

SEQ ID NO: 4588 - DNA, 33 bp, Monilinia fructicola
  source 1..33: mol_type = other DNA
cttgcggcatccttgtccggggcgtccgcacca

SEQ ID NO: 4589 - DNA, 33 bp, Zymoseptoria tritici; identical to SEQ ID NO: 4447
  source 1..33: mol_type = other DNA

SEQ ID NO: 4590 - DNA, 33 bp, Zymoseptoria tritici; identical to SEQ ID NO: 4447
  source 1..33: mol_type = other DNA

SEQ ID NO: 4591 - DNA, 33 bp, Zymoseptoria tritici; identical to SEQ ID NO: 4447
  source 1..33: mol_type = other DNA

SEQ ID NO: 4592 - DNA, 33 bp, Zymoseptoria tritici; identical to SEQ ID NO: 4447
  source 1..33: mol_type = other DNA

SEQ ID NO: 4593 - DNA, 33 bp, Zymoseptoria tritici; identical to SEQ ID NO: 4447
  source 1..33: mol_type = other DNA

SEQ ID NO: 4594 - DNA, 33 bp, Zymoseptoria tritici; identical to SEQ ID NO: 4447
  source 1..33: mol_type = other DNA

SEQ ID NO: 4595 - DNA, 33 bp, Zymoseptoria tritici; identical to SEQ ID NO: 4459
  source 1..33: mol_type = other DNA

SEQ ID NO: 4596 - DNA, 33 bp, Zymoseptoria tritici; identical to SEQ ID NO: 4459
  source 1..33: mol_type = other DNA

SEQ ID NO: 4597 - DNA, 36 bp, Ophiocordyceps camponoti-floridani
  source 1..36: mol_type = other DNA
cttggggccacactgcgagttgggacggtagcacca

SEQ ID NO: 4598 - DNA, 36 bp, Lasiodiplodia theobromae
  source 1..36: mol_type = other DNA
cttgtgacagggctgaccgcggatgcggccacagaa

SEQ ID NO: 4599 - DNA, 36 bp, Lasiodiplodia theobromae; identical to SEQ ID NO: 4598
  source 1..36: mol_type = other DNA

SEQ ID NO: 4600 - DNA, 27 bp, Massarina eburnea
  source 1..27: mol_type = other DNA
gcagggctgaccaacaaagcggcattt

SEQ ID NO: 4601 - DNA, 39 bp, Pseudogymnoascus verrucosus
  source 1..39: mol_type = other DNA
gcgcttaactttgccacatggctggccagggcgccagca

SEQ ID NO: 4602 - DNA, 42 bp, Aspergillus fumigatiaffinis; identical to SEQ ID NO: 3425
  source 1..42: mol_type = other DNA

SEQ ID NO: 4603 - DNA, 42 bp, Aspergillus fumigatiaffinis; identical to SEQ ID NO: 3425
  source 1..42: mol_type = other DNA

SEQ ID NO: 4604 - DNA, 42 bp, Xylona heveae
  source 1..42: mol_type = other DNA
gcgcttagccttagagcagccctggccaggaaggtggcagaa

SEQ ID NO: 4605 - DNA, 36 bp, Colletotrichum siamense
  source 1..36: mol_type = other DNA
gcgcttccagcaaggctggccgggcttcgtgcacca

SEQ ID NO: 4606 - DNA, 36 bp, Colletotrichum siamense; identical to SEQ ID NO: 4605
  source 1..36: mol_type = other DNA

SEQ ID NO: 4607 - DNA, 36 bp, Colletotrichum viniferum
  source 1..36: mol_type = other DNA
gcgcttccagcaaggctggccgggcttggtgcacca

SEQ ID NO: 4608 - DNA, 36 bp, Cordyceps fumosorosea
  source 1..36: mol_type = other DNA
gcgcttccagcacggctgcgcggggcggaagcacca

SEQ ID NO: 4609 - DNA, 36 bp, Sporothrix schenckii
  source 1..36: mol_type = other DNA
gcgcttccagcaggactggcccttcagggggcaata

SEQ ID NO: 4610 - DNA, 42 bp, Coniochaeta pulveracea
  source 1..42: mol_type = other DNA
gcgcttcgacttccagcatggctgacctgggtgggggcacca

SEQ ID NO: 4611 - DNA, 42 bp, Drechmeria coniospora
  source 1..42: mol_type = other DNA
gcgcttcgccttccagcacccagacccgggacgagtgcacca

SEQ ID NO: 4612 - DNA, 42 bp, Stachybotrys chartarum
  source 1..42: mol_type = other DNA
gcgcttcgctttccagcacggctgcccgggacgagtgcacca

SEQ ID NO: 4613 - DNA, 42 bp, Stachybotrys chartarum; identical to SEQ ID NO: 4612
  source 1..42: mol_type = other DNA

SEQ ID NO: 4614 - DNA, 45 bp, Tothia fuscella
  source 1..45: mol_type = other DNA
gcgcttcgctttgccacatggctggccacgacgaaagcatctcca

SEQ ID NO: 4615 - DNA, 39 bp, Lachnellula occidentalis
  source 1..39: mol_type = other DNA
gcgcttctccttccagcagccctgtccacgagctccgca

SEQ ID NO: 4616 - DNA, 39 bp, Lachnellula willkommii
  source 1..39: mol_type = other DNA
gcgcttctccttccagcagccctgtccgcgagctccgca

SEQ ID NO: 4617 - DNA, 39 bp, Lachnellula subtilissima
  source 1..39: mol_type = other DNA
gcgcttctccttccagcagccttggccacgggcaccaca

SEQ ID NO: 4618 - DNA, 42 bp, Ophiostoma piceae
  source 1..42: mol_type = other DNA
gcgcttgaccttccagcagggctggccgaccatgggacacca

SEQ ID NO: 4619 - DNA, 39 bp, Pseudogymnoascus sp.
  source 1..39: mol_type = other DNA; note = 24MN13
gcgcttgaccttgccacatggctgcccagggcgccagca

SEQ ID NO: 4620 - DNA, 39 bp, Pseudogymnoascus sp.
  source 1..39: mol_type = other DNA; note = VKM F-4246
gcgcttgaccttgccacatggctggccaggaagccagca

SEQ ID NO: 4621 - DNA, 39 bp, Pseudogymnoascus sp.; identical to SEQ ID NO: 4620
  source 1..39: mol_type = other DNA; note = VKM F-4513 (FW-928)

SEQ ID NO: 4622 - DNA, 42 bp, Pseudogymnoascus sp.; identical to SEQ ID NO: 4159
  source 1..42: mol_type = other DNA; note = VKM F-4520 (FW-2644)

SEQ ID NO: 4623 - DNA, 42 bp, Cryomyces minteri
  source 1..42: mol_type = other DNA
gcgcttgaccttggagcagccttgaccagggagatggcagaa

SEQ ID NO: 4624 - DNA, 39 bp, Pseudogymnoascus sp.
  source 1..39: mol_type = other DNA; note = VKM F-4514 (FW-929)
gcgcttgacctttccgcagggctggccggggcgccagca

SEQ ID NO: 4625 - DNA, 42 bp, Pseudogymnoascus sp.
  source 1..42: mol_type = other DNA; note = VKM F-4517 (FW-2822)
gcgcttgactttgccacatggctgaccagggcgccagcagta

SEQ ID NO: 4626 - DNA, 42 bp, Pseudogymnoascus sp.
  source 1..42: mol_type = other DNA; note = 23342-1-I1
gcgcttgactttgccacatggctggccggggcgccagcagaa

SEQ ID NO: 4627 - DNA, 39 bp, Marssonina coronariae
  source 1..39: mol_type = other DNA
gcgcttgactttgccgcaaggttgtccaggctttccgca

SEQ ID NO: 4628 - DNA, 39 bp, Cordyceps fumosorosea
  source 1..39: mol_type = other DNA
gcgcttgagcttccagcagggctgggcggggcggaagca

SEQ ID NO: 4629 - DNA, 42 bp, Neofusicoccum parvum
  source 1..42: mol_type = other DNA
gcgcttgagtttcgagcagggctgacccttccagcgacacca

SEQ ID NO: 4630 - DNA, 39 bp, Lachnellula willkommii; identical to SEQ ID NO: 3860
  source 1..39: mol_type = other DNA

SEQ ID NO: 4631 - DNA, 33 bp, Rutstroemia sp.
  source 1..33: mol_type = other DNA; note = NJR-2017a WRK4
gcgcttgcagggctggcctggacgaccgcacca

SEQ ID NO: 4632 - DNA, 42 bp, Trichoderma atroviride
  source 1..42: mol_type = other DNA; strain = IMI 206040
gcgcttggccttccaacaagactcgccgacgcgccagcacca

SEQ ID NO: 4633 - DNA, 42 bp, Trichoderma gamsii; identical to SEQ ID NO: 4632
  source 1..42: mol_type = other DNA

SEQ ID NO: 4634 - DNA, 42 bp, Trichoderma citrinoviride
  source 1..42: mol_type = other DNA
gcgcttggccttccagcagggctcgccgatgcggtagcacca

SEQ ID NO: 4635 - DNA, 42 bp, Trichoderma parareesei; identical to SEQ ID NO: 4634
  source 1..42: mol_type = other DNA

SEQ ID NO: 4636 - DNA, 42 bp, Trichoderma reesei; identical to SEQ ID NO: 4634
  source 1..42: mol_type = other DNA; strain = QM6a

SEQ ID NO: 4637 - DNA, 42 bp, Cordyceps fumosorosea
  source 1..42: mol_type = other DNA
gcgcttggccttccagcagggctgcgcggggcggaagcacca

SEQ ID NO: 4638 - DNA, 42 bp, Neofusicoccum parvum
  source 1..42: mol_type = other DNA
gcgcttggccttcgaacacggctgacccttccaccggcacca

SEQ ID NO: 4639 - DNA, 42 bp, Lasallia pustulata; identical to SEQ ID NO: 3882
  source 1..42: mol_type = other DNA

SEQ ID NO: 4640 - DNA, 42 bp, Delitschia confertaspora
  source 1..42: mol_type = other DNA
gcgcttggccttggagcaggactggccgggaaagcggcaatt

SEQ ID NO: 4641 - DNA, 42 bp, Saccharata proteae
  source 1..42: mol_type = other DNA
gcgcttggccttggagcagggctggccgggcaagtggcagaa

SEQ ID NO: 4642 - DNA, 42 bp, Zymoseptoria tritici
  source 1..42: mol_type = other DNA
gcgcttggctttggcacaaggggcgccgatggcaccgcacca

SEQ ID NO: 4643 - DNA, 42 bp, Zymoseptoria tritici; identical to SEQ ID NO: 4642
  source 1..42: mol_type = other DNA

SEQ ID NO: 4644 - DNA, 42 bp, Zymoseptoria tritici; identical to SEQ ID NO: 4642
  source 1..42: mol_type = other DNA

SEQ ID NO: 4645 - DNA, 42 bp, Zymoseptoria tritici; identical to SEQ ID NO: 4642
  source 1..42: mol_type = other DNA

SEQ ID NO: 4646 - DNA, 42 bp, Pseudogymnoascus sp.
  source 1..42: mol_type = other DNA; note = VKM F-4520 (FW-2644)
gcgcttggcttttccgcagggctgtccgggacgccagcagaa

SEQ ID NO: 4647 - DNA, 42 bp, Saccharata proteae
  source 1..42: mol_type = other DNA
gcgcttggtcttggagcaaggctggccggggagatggcagaa

SEQ ID NO: 4648 - DNA, 42 bp, Sporothrix brasiliensis
  source 1..42: mol_type = other DNA
gcgcttgtacttccagcacgactggcctttgagggggcagta

SEQ ID NO: 4649 - DNA, 39 bp, Lophium mytilinum
  source 1..39: mol_type = other DNA
gcgcttgtccttgctgcaagactggcccggaagatggca

SEQ ID NO: 4650 - DNA, 45 bp, Lophium mytilinum
  source 1..45: mol_type = other DNA
gcgcttgtccttgctgcaagactggcctggaagatggcaacccca

SEQ ID NO: 4651 - DNA, 42 bp, Amniculicola lignicola
  source 1..42: mol_type = other DNA
gcgcttgttcttgccgcagggttggcccgggaagcggcacca

SEQ ID NO: 4652 - DNA, 42 bp, Metarhizium rileyi
  source 1..42: mol_type = other DNA
gcgctttgccttccagcaaggctgtcccggtcgccaacacca

SEQ ID NO: 4653 - DNA, 42 bp, Metarhizium rileyi; identical to SEQ ID NO: 4652
  source 1..42: mol_type = other DNA

SEQ ID NO: 4654 - DNA, 42 bp, Cenococcum geophilum
  source 1..42: mol_type = other DNA
ggctgccatctcccgggccagtcctgcgggaaggccaagcgc

SEQ ID NO: 4655 - DNA, 33 bp, Lachnellula suecica
  source 1..33: mol_type = other DNA
ggctgtggtgcccgaggccaaggttgctacaag

SEQ ID NO: 4656 - DNA, 33 bp, Ophiocordyceps camponoti-rufipedis
  source 1..33: mol_type = other DNA
ggttgggcagttggagaggggacgagtgcacca

SEQ ID NO: 4657 - DNA, 36 bp, Massarina eburnea
  source 1..36: mol_type = other DNA
gtcacgtttgcaaggctggccgacgaagcggcaggt

SEQ ID NO: 4658 - DNA, 36 bp, Massarina eburnea
  source 1..36: mol_type = other DNA
gtcacgtttgcaaggctggccgacgaagcggcattt

SEQ ID NO: 4659 - DNA, 39 bp, Botryosphaeria dothidea
  source 1..39: mol_type = other DNA
tactgccacttccgcggctcggcttgtcccaagaagcgt

SEQ ID NO: 4660 - DNA, 39 bp, Botryosphaeria dothidea; identical to SEQ ID NO: 4659
  source 1..39: mol_type = other DNA

SEQ ID NO: 4661 - DNA, 42 bp, Mytilinidion resinicola
  source 1..42: mol_type = other DNA
tactgccatctccccggccaatcttgcagcaaagataaacgc

SEQ ID NO: 4662 - DNA, 42 bp, Pseudogymnoascus sp.
  source 1..42: mol_type = other DNA; note = VKM F-4515 (FW-2607)
tactgctggcgccctggtcagccatgtggcaaagtcaagcgc

SEQ ID NO: 4663 - DNA, 42 bp, Pseudogymnoascus sp.
  source 1..42: mol_type = other DNA; note = VKM F-4515 (FW-2607)
tactgctggcgtccaggccagccctgcgggaaggccaaacgc

SEQ ID NO: 4664 - DNA, 18 bp, Botryosphaeria dothidea
  source 1..18: mol_type = other DNA
tattgcaggttccggggc

SEQ ID NO: 4665 - DNA, 36 bp, Sporothrix schenckii
  source 1..36: mol_type = other DNA; strain = 1099-18
tattgccccctgaagggccagtcctgctggaagcgc

SEQ ID NO: 4666 - DNA, 39 bp, Lachnellula occidentalis
  source 1..39: mol_type = other DNA
tcgcttgaccttccagcagccctgtcctcgtgctccgca

SEQ ID NO: 4667 - DNA, 18 bp, Lachnellula subtilissima
  source 1..18: mol_type = other DNA
tcgcttgatcttccagca

SEQ ID NO: 4668 - DNA, 39 bp, Lachnellula hyalina; identical to SEQ ID NO: 3868
  source 1..39: mol_type = other DNA

SEQ ID NO: 4669 - DNA, 42 bp, Trichoderma guizhouense
  source 1..42: mol_type = other DNA
tcgcttggggatccagcaaccctctccgacgcggtagcacca

SEQ ID NO: 4670 - DNA, 42 bp, Trichoderma harzianum
  source 1..42: mol_type = other DNA
tcgcttggggatccagcaaggcattccaatgcggtagcacca

SEQ ID NO: 4671 - DNA, 36 bp, Ustilaginoidea virens
  source 1..36: mol_type = other DNA
tctcttccagcatggctctccgggccggtcgcacca

SEQ ID NO: 4672 - DNA, 42 bp, Aspergillus lentulus; identical to SEQ ID NO: 3424
  source 1..42: mol_type = other DNA

SEQ ID NO: 4673 - DNA, 42 bp, Aspergillus lentulus; identical to SEQ ID NO: 3424
  source 1..42: mol_type = other DNA

SEQ ID NO: 4674 - DNA, 42 bp, Aspergillus lentulus; identical to SEQ ID NO: 3424
  source 1..42: mol_type = other DNA

SEQ ID NO: 4675 - DNA, 42 bp, Aspergillus lentulus; identical to SEQ ID NO: 3424
  source 1..42: mol_type = other DNA

SEQ ID NO: 4676 - DNA, 39 bp, Lachnellula hyalina
  source 1..39: mol_type = other DNA
tctcttctccttccagcatccttggcctcgggcaccgca

SEQ ID NO: 4677 - DNA, 42 bp, Metarhizium rileyi
  source 1..42: mol_type = other DNA
tctcttgaccttccagcaaggctgaccagggcgccagcacca

SEQ ID NO: 4678 - DNA, 42 bp, Metarhizium rileyi; identical to SEQ ID NO: 4677
  source 1..42: mol_type = other DNA

SEQ ID NO: 4679 - DNA, 42 bp, Ustilaginoidea virens
  source 1..42: mol_type = other DNA
tctcttgaccttccagcatggctcccctgggcggtcgcacca

SEQ ID NO: 4680 - DNA, 30 bp, Coleophoma cylindrospora
  source 1..30: mol_type = other DNA
tctcttgcacggttgacccatacgtccgca

SEQ ID NO: 4681 - DNA, 39 bp, Botrytis fragariae
  source 1..39: mol_type = other DNA
tgcaatatccgatcatatacttgcttcgagtctcgcaga

SEQ ID NO: 4682 - DNA, 30 bp, Sodiomyces alkalinus
  source 1..30: mol_type = other DNA
tgcaccaagcccggccagccctgctggaag

SEQ ID NO: 4683 - DNA, 39 bp, Sodiomyces alkalinus
  source 1..39: mol_type = other DNA
tgcaccaagcccggccagccctgctggaagaacaagcgt

SEQ ID NO: 4684 - DNA, 33 bp, Dothistroma septosporum
  source 1..33: mol_type = other DNA
tgcaccgtacccggcctcgcctgcggcaagcgc

SEQ ID NO: 4685 - DNA, 39 bp, Mytilinidion resinicola
  source 1..39: mol_type = other DNA
tgccatctccccggccaatcctgcagcaaagacaagcgc

SEQ ID NO: 4686 - DNA, 39 bp, Glonium stellatum
  source 1..39: mol_type = other DNA
tgccatctcccgggtcaatcctgccccaaggacaagcgc

SEQ ID NO: 4687 - DNA, 39 bp, Verticillium longisporum
  source 1..39: mol_type = other DNA
tgcccccgacctggacagggctgctggaagaacaagcgc

SEQ ID NO: 4688 - DNA, 39 bp, Verticillium dahliae; identical to SEQ ID NO: 4412
  source 1..39: mol_type = other DNA

SEQ ID NO: 4689 - DNA, 39 bp, Verticillium dahliae; identical to SEQ ID NO: 4412
  source 1..39: mol_type = other DNA

SEQ ID NO: 4690 - DNA, 39 bp, Verticillium dahliae; identical to SEQ ID NO: 4412
  source 1..39: mol_type = other DNA

SEQ ID NO: 4691 - DNA, 39 bp, Verticillium dahliae; identical to SEQ ID NO: 4412
  source 1..39: mol_type = other DNA

SEQ ID NO: 4692 - DNA, 39 bp, Verticillium dahliae; identical to SEQ ID NO: 4412
  source 1..39: mol_type = other DNA

SEQ ID NO: 4693 - DNA, 27 bp, Aaosphaeria arxii
  source 1..27: mol_type = other DNA
tgccgctggcccggtcagccctgctct

SEQ ID NO: 4694 - DNA, 27 bp, Aaosphaeria arxii
  source 1..27: mol_type = other DNA
tgccgctggcccggtcagccctgctct

SEQ ID NO: 4695 - DNA, 27 bp, Aaosphaeria arxii
  source 1..27: mol_type = other DNA
tgccgctggcccggtcagccctgctct

SEQ ID NO: 4696 - DNA, 36 bp, Melanomma pulvis-pyrius
  source 1..36: mol_type = other DNA
tgccgcttcccaggccagccctgctctaagaagcgc

SEQ ID NO: 4697 - DNA, 36 bp, Polyplosphaeria fusca
  source 1..36: mol_type = other DNA
tgccgcttcccaggctcattctgtgggaagaagagg

SEQ ID NO: 4698 - DNA, 27 bp, Lophiotrema nucula
  source 1..27: mol_type = other DNA
tgccgcttccccggtcagccctgctct

SEQ ID NO: 4699 - DNA, 27 bp, Lophiotrema nucula
  source 1..27: mol_type = other DNA
tgccgcttccccggtcagccctgctct

SEQ ID NO: 4700 - DNA, 30 bp, Melanomma pulvis-pyrius
  source 1..30: mol_type = other DNA
tgccgcttcccgggccagccatgctccaag

SEQ ID NO: 4701 - DNA, 30 bp, Melanomma pulvis-pyrius; identical to SEQ ID NO: 4700
  source 1..30: mol_type = other DNA

SEQ ID NO: 4702 - DNA, 33 bp, Melanomma pulvis-pyrius
  source 1..33: mol_type = other DNA
tgccgcttcccgggccagccatgctccaagcgt

SEQ ID NO: 4703 - DNA, 39 bp, Diplocarpon rosae
  source 1..39: mol_type = other DNA
tgcggacacccaggacagccatgtggcaaggctaagcgt

SEQ ID NO: 4704 - DNA, 39 bp, Diplocarpon rosae
  source 1..39: mol_type = other DNA
tgcggacacccaggccagccctgtggtaaggcaaaacgc

SEQ ID NO: 4705 - DNA, 30 bp, Cadophora sp.
  source 1..30: mol_type = other DNA; note = DSE1049
tgcggacacccaggtcaaccttgcggaaaa

SEQ ID NO: 4706 - DNA, 33 bp, Cadophora sp.
  source 1..33: mol_type = other DNA; note = DSE1049
tgcggacacccaggtcaaccttgcggaaaacgt

SEQ ID NO: 4707 - DNA, 39 bp, Amorphotheca resinae
  source 1..39: mol_type = other DNA
tgcggcaaagttggacagccatgcggaaaggcaaagcgt

SEQ ID NO: 4708 - DNA, 39 bp, Drepanopeziza brunnea
  source 1..39: mol_type = other DNA
tgcggctaccgcggacagccatgccccaaggccaagcgt

SEQ ID NO: 4709 - DNA, 39 bp, Verticillium longisporum
  source 1..39: mol_type = other DNA
tgctcccgacctggacagggttgctggaaggccaagcgt

SEQ ID NO: 4710 - DNA, 21 bp, Ophiocordyceps camponoti-floridani
  source 1..21: mol_type = other DNA
tgctcgaggcgtggagaggcg

SEQ ID NO: 4711 - DNA, 39 bp, Pseudogymnoascus sp.
  source 1..39: mol_type = other DNA; note = VKM F-3557
tgctggcgccccggccagccctgtggcaaggtcaagcgc

SEQ ID NO: 4712 - DNA, 39 bp, Pseudogymnoascus sp.; identical to SEQ ID NO: 4711
  source 1..39: mol_type = other DNA; note = VKM F-4516 (FW-969)

SEQ ID NO: 4713 - DNA, 39 bp, Pseudogymnoascus sp.
  source 1..39: mol_type = other DNA; note = VKM F-103
tgctggcgccctggccagccatgtggcaaagttaagcgc

SEQ ID NO: 4714 - DNA, 39 bp, Pseudogymnoascus sp.; identical to SEQ ID NO: 4195
  source 1..39: mol_type = other DNA; note = 03VT05

SEQ ID NO: 4715 - DNA, 39 bp, Pseudogymnoascus sp.; identical to SEQ ID NO: 4195
  source 1..39: mol_type = other DNA; note = VKM F-4519 (FW-2642)

SEQ ID NO: 4716 - DNA, 39 bp, Pseudogymnoascus sp.
  source 1..39: mol_type = other DNA; note = 05NY08
tgctggcgccctggccagccatgtggcaaggttaagcgc

SEQ ID NO: 4717 - DNA, 39 bp, Pseudogymnoascus sp.
  source 1..39: mol_type = other DNA; note = VKM F-3557
tgctggcgtccaggccagccatgcggaaaagccaagcgc

SEQ ID NO: 4718 - DNA, 39 bp, Pseudogymnoascus sp.; identical to SEQ ID NO: 4717
  source 1..39: mol_type = other DNA; note = VKM F-4516 (FW-969)

SEQ ID NO: 4719 - DNA, 39 bp, Pseudogymnoascus sp.
  source 1..39: mol_type = other DNA; note = VKM F-4516 (FW-969)
tgctggcgtccaggccagccgtgcggaaaagccaagcgc

SEQ ID NO: 4720 - DNA, 39 bp, Pseudogymnoascus sp.
  source 1..39: mol_type = other DNA; note = VKM F-103
tgctggcgtccaggccagccgtgcggcaaagccaagcgc

SEQ ID NO: 4721 - DNA, 39 bp, Pseudogymnoascus sp.
  source 1..39: mol_type = other DNA; note = WSF 3629
tgctggcgtccaggtcagccatgcggcaaggtcaagcgt

SEQ ID NO: 4722 - DNA, 39 bp, Pseudogymnoascus sp.
  source 1..39: mol_type = other DNA; note = WSF 3629
tgctggcgtcctggccagccatgtggcaaagctaagcgt

SEQ ID NO: 4723 - DNA, 39 bp, Pseudogymnoascus sp.
  source 1..39: mol_type = other DNA; note = 03VT05
tgctggcgtcctggccagccatgtggtaaagctaagcgt

SEQ ID NO: 4724 - DNA, 39 bp, Pseudogymnoascus sp.
  source 1..39: mol_type = other DNA; note = 05NY08
tgctggcgtcctggtcagccatgcggaaaagctaagcgt

SEQ ID NO: 4725 - DNA, 39 bp, Westerdykella ornata
  source 1..39: mol_type = other DNA
tgctggttccgtggccagccctgctccaaggccaagcgc

SEQ ID NO: 4726 - DNA, 27 bp, Westerdykella ornata
  source 1..27: mol_type = other DNA
tgctggttccgtgggcagccctgcaag

SEQ ID NO: 4727 - DNA, 39 bp, Westerdykella ornata
  source 1..39: mol_type = other DNA
tgctggttccgtgggcagccctgcaagaaggtcaagcgc

SEQ ID NO: 4728 - DNA, 63 bp, Aplosporella prunicola; identical to SEQ ID NO: 3379
  source 1..63: mol_type = other DNA

SEQ ID NO: 4729 - DNA, 42 bp, Zasmidium cellare
  source 1..42: mol_type = other DNA
tggaagtgtggtgtcccaggccaagcttgcaacaagaagcga

SEQ ID NO: 4730 - DNA, 51 bp, Aplosporella prunicola
  source 1..51: mol_type = other DNA
tggccgcgcttctgcttccgccccggccagccctgcaccaaggccaagcgg

SEQ ID NO: 4731 - DNA, 45 bp, Mytilinidion resinicola
  source 1..45: mol_type = other DNA
tggggctgccatcttccgggacagtcttgtagcaaggacaagcgc

SEQ ID NO: 4732 - DNA, 42 bp, Coniochaeta ligniaria
  source 1..42: mol_type = other DNA
tggtgcaacatccgcggcgagccgtgctggaagtccaagcgt

SEQ ID NO: 4733 - DNA, 33 bp, Purpureocillium lilacinum
  source 1..33: mol_type = other DNA
tggtgcaaccgccccggccagccctgcaagcga

SEQ ID NO: 4734 - DNA, 33 bp, Purpureocillium lilacinum; identical to SEQ ID NO: 4733
  source 1..33: mol_type = other DNA

SEQ ID NO: 4735 - DNA, 33 bp, Purpureocillium lilacinum; identical to SEQ ID NO: 4733
  source 1..33: mol_type = other DNA

SEQ ID NO: 4736 - DNA, 33 bp, Escovopsis weberi; identical to SEQ ID NO: 3831
  source 1..33: mol_type = other DNA

SEQ ID NO: 4737 - DNA, 36 bp, Escovopsis weberi
  source 1..36: mol_type = other DNA
tggtgcaccaacccgggccagggctgctggaagcgc

SEQ ID NO: 4738 - DNA, 33 bp, Phaeoacremonium minimum; identical to SEQ ID NO: 4100
  source 1..33: mol_type = other DNA

SEQ ID NO: 4739 - DNA, 33 bp, Phaeoacremonium minimum
  source 1..33: mol_type = other DNA
tggtgcaccaagcatggccagtcgtgctggaag

SEQ ID NO: 4740 - DNA, 39 bp, Phaeoacremonium minimum
  source 1..39: mol_type = other DNA
tggtgcaccaagcatggccagtcgtgctggaagaagcga

SEQ ID NO: 4741 - DNA, 36 bp, Colletotrichum aenigma
  source 1..36: mol_type = other DNA
tggtgcaccaagcccggccaaccgtgctggaagcgc

SEQ ID NO: 4742 - DNA, 36 bp, Colletotrichum aenigma; identical to SEQ ID NO: 4741
  source 1..36: mol_type = other DNA

SEQ ID NO: 4743 - DNA, 39 bp, Chaetomium thermophilum
  source 1..39: mol_type = other DNA
tggtgcacccgcttcccgggccagccctgctggaagcgc

SEQ ID NO: 4744 - DNA, 33 bp, Madurella mycetomatis; identical to SEQ ID NO: 3923
  source 1..33: mol_type = other DNA

SEQ ID NO: 4745 - DNA, 36 bp, Madurella mycetomatis; identical to SEQ ID NO: 3924
  source 1..36: mol_type = other DNA

SEQ ID NO: 4746 - DNA, 39 bp, Madurella mycetomatis
  source 1..39: mol_type = other DNA
tggtgcaccggtttccccggccagccctgctggaagcgt

SEQ ID NO: 4747 - DNA, 36 bp, Thermothielavioides terrestris
  source 1..36: mol_type = other DNA
tggtgcaccttcttcctgggccagccgtgctggaag

SEQ ID NO: 4748 - DNA, 39 bp, Thermothielavioides terrestris
  source 1..39: mol_type = other DNA
tggtgcaccttcttcctgggccagccgtgctggaagcgg

SEQ ID NO: 4749 - DNA, 36 bp, Colletotrichum asianum
  source 1..36: mol_type = other DNA
tggtgcacgaagcccggccagccttgctggaagcgc

SEQ ID NO: 4750 - DNA, 36 bp, Colletotrichum fructicola; identical to SEQ ID NO: 4749
  source 1..36: mol_type = other DNA

SEQ ID NO: 4751 - DNA, 36 bp, Colletotrichum fructicola; identical to SEQ ID NO: 4749
  source 1..36: mol_type = other DNA

SEQ ID NO: 4752 - DNA, 36 bp, Colletotrichum fructicola; identical to SEQ ID NO: 4749
  source 1..36: mol_type = other DNA

SEQ ID NO: 4753 - DNA, 36 bp, Colletotrichum fructicola; identical to SEQ ID NO: 4749
  source 1..36: mol_type = other DNA

SEQ ID NO: 4754 - DNA, 36 bp, Colletotrichum siamense; identical to SEQ ID NO: 4749
  source 1..36: mol_type = other DNA

SEQ ID NO: 4755 - DNA, 30 bp, Stachybotrys chartarum; identical to SEQ ID NO: 631
  source 1..30: mol_type = other DNA

SEQ ID NO: 4756 - DNA, 30 bp, Stachybotrys chartarum; identical to SEQ ID NO: 631
  source 1..30: mol_type = other DNA

SEQ ID NO: 4757 - DNA, 33 bp, Phaeoacremonium minimum
  source 1..33: mol_type = other DNA
tggtgcactaagcacggccagtcatgctggaag

SEQ ID NO: 4758 - DNA, 33 bp, Drechmeria coniospora
  source 1..33: mol_type = other DNA
tggtgcactcgccccggaagtggttgctggaag

SEQ ID NO: 4759 - DNA, 42 bp, Drechmeria coniospora
  source 1..42: mol_type = other DNA
tggtgcactcgccccggaagtggttgctggaaggtcaagaga

SEQ ID NO: 4760 - DNA, 33 bp, Purpureocillium lilacinum
  source 1..33: mol_type = other DNA
tggtgcactcgccgcggccagccttgcaagcgc

SEQ ID NO: 4761 - DNA, 33 bp, Purpureocillium lilacinum; identical to SEQ ID NO: 4760
  source 1..33: mol_type = other DNA

SEQ ID NO: 4762 - DNA, 33 bp, Purpureocillium lilacinum; identical to SEQ ID NO: 4760
  source 1..33: mol_type = other DNA

SEQ ID NO: 4763 - DNA, 42 bp, Drechmeria coniospora
  source 1..42: mol_type = other DNA
tggtgcactcgtcccgggtctgggtgctggaaggcgaagcgc

SEQ ID NO: 4764 - DNA, 45 bp, Madurella mycetomatis
  source 1..45: mol_type = other DNA
tggtgcactggcttccccggccagccttgctggaaggagaagcgt

SEQ ID NO: 4765 - DNA, 33 bp, Beauveria bassiana
  source 1..33: mol_type = other DNA
tggtgcatgagacccggtcagccatgctggaag

SEQ ID NO: 4766 - DNA, 33 bp, Beauveria bassiana; identical to SEQ ID NO: 4765
  source 1..33: mol_type = other DNA

SEQ ID NO: 4767 - DNA, 33 bp, Beauveria bassiana; identical to SEQ ID NO: 4765
  source 1..33: mol_type = other DNA

SEQ ID NO: 4768 - DNA, 33 bp, Beauveria bassiana; identical to SEQ ID NO: 4765
  source 1..33: mol_type = other DNA

SEQ ID NO: 4769 - DNA, 33 bp, Beauveria bassiana
  source 1..33: mol_type = other DNA
tggtgcatgagacccggtcagccgtgctggaag

SEQ ID NO: 4770 - DNA, 33 bp, Beauveria bassiana; identical to SEQ ID NO: 4769
  source 1..33: mol_type = other DNA

SEQ ID NO: 4771 - DNA, 33 bp, Beauveria bassiana; identical to SEQ ID NO: 4769
  source 1..33: mol_type = other DNA

SEQ ID NO: 4772 - DNA, 33 bp, Beauveria bassiana; identical to SEQ ID NO: 4769
  source 1..33: mol_type = other DNA

SEQ ID NO: 4773 - DNA, 33 bp, Beauveria bassiana; identical to SEQ ID NO: 4769
  source 1..33: mol_type = other DNA

SEQ ID NO: 4774 - DNA, 33 bp, Beauveria bassiana; identical to SEQ ID NO: 4769
  source 1..33: mol_type = other DNA

SEQ ID NO: 4775 - DNA, 33 bp, Beauveria bassiana; identical to SEQ ID NO: 4769
  source 1..33: mol_type = other DNA

SEQ ID NO: 4776 - DNA, 33 bp, Beauveria bassiana; identical to SEQ ID NO: 4769
  source 1..33: mol_type = other DNA

SEQ ID NO: 4777 - DNA, 42 bp, Aspergillus fumigatiaffinis; identical to SEQ ID NO: 3440
  source 1..42: mol_type = other DNA

SEQ ID NO: 4778 - DNA, 42 bp, Aspergillus fumigatiaffinis; identical to SEQ ID NO: 3440
  source 1..42: mol_type = other DNA

SEQ ID NO: 4779 - DNA, 33 bp, Pyricularia oryzae
  source 1..33: mol_type = other DNA
tggtgcccccggcgcggccagccctgctggaag

SEQ ID NO: 4780 - DNA, 33 bp, Pyricularia oryzae; identical to SEQ ID NO: 4779
  source 1..33: mol_type = other DNA

SEQ ID NO: 4781 - DNA, 33 bp, Pyricularia oryzae; identical to SEQ ID NO: 4779
  source 1..33: mol_type = other DNA

SEQ ID NO: 4782 - DNA, 42 bp, Pyricularia oryzae
  source 1..42: mol_type = other DNA
tggtgcccccggcgcggccagccctgctggaaggtcaagcgc

SEQ ID NO: 4783 - DNA, 42 bp, Pyricularia oryzae; identical to SEQ ID NO: 4782
  source 1..42: mol_type = other DNA

SEQ ID NO: 4784 - DNA, 42 bp, Pyricularia oryzae; identical to SEQ ID NO: 4782
  source 1..42: mol_type = other DNA

SEQ ID NO: 4785 - DNA, 33 bp, Phialemoniopsis curvata
  source 1..33: mol_type = other DNA
tggtgcccgatccgcggccagccctgctggaag

SEQ ID NO: 4786 - DNA, 42 bp, Phialemoniopsis curvata
  source 1..42: mol_type = other DNA
tggtgcccgatccgcggccagccctgctggaaggtcaagcgg

SEQ ID NO: 4787 - DNA, 42 bp, Phialemoniopsis curvata
  source 1..42: mol_type = other DNA
tggtgcccgatccggggccagccgtgctggaaggccaagagg

SEQ ID NO: 4788 - DNA, 33 bp, Pyricularia pennisetigena
  source 1..33: mol_type = other DNA
tggtgcccgcgccgcggccaaccctgctggaag

SEQ ID NO: 4789 - DNA, 36 bp, Pyricularia pennisetigena
  source 1..36: mol_type = other DNA
tggtgcccgcgccgcggccaaccctgctggaagcgc

SEQ ID NO: 4790 - DNA, 33 bp, Neurospora tetrasperma; identical to SEQ ID NO: 4047
  source 1..33: mol_type = other DNA

SEQ ID NO: 4791 - DNA, 39 bp, Neurospora tetrasperma
  source 1..39: mol_type = other DNA
tggtgccgcatccacggccagtcctgctggaagaagcgt

SEQ ID NO: 4792 - DNA, 42 bp, Neurospora tetrasperma
  source 1..42: mol_type = other DNA
tggtgccgcatccacggccagtcctgctggaaggccaagcgc

SEQ ID NO: 4793 - DNA, 36 bp, Neurospora tetrasperma
  source 1..36: mol_type = other DNA
tggtgccgcatccacggccagtcgtgctggaagcgt

SEQ ID NO: 4794 - DNA, 33 bp, Neurospora tetrasperma
  source 1..33: mol_type = other DNA
tggtgccggatccacggccagtcctgctggaag

SEQ ID NO: 4795 - DNA, 39 bp, Neurospora tetrasperma
  source 1..39: mol_type = other DNA
tggtgccggatccacggccagtcctgctggaagaagcgt

SEQ ID NO: 4796 - DNA, 36 bp, Neurospora tetrasperma
  source 1..36: mol_type = other DNA
tggtgccggatccacggccagtcgtgctggaagcgt

SEQ ID NO: 4797 - DNA, 33 bp, Sordaria macrospora
  source 1..33: mol_type = other DNA
tggtgccggatccatggccagtcctgctggaag

SEQ ID NO: 4798 - DNA, 33 bp, Sordaria macrospora; identical to SEQ ID NO: 4797
  source 1..33: mol_type = other DNA

SEQ ID NO: 4799 - DNA, 42 bp, Sordaria macrospora
  source 1..42: mol_type = other DNA
tggtgccggatccatggccagtcctgctggaaggccaagcgc

SEQ ID NO: 4800 - DNA, 42 bp, Sordaria macrospora; identical to SEQ ID NO: 4799
  source 1..42: mol_type = other DNA

SEQ ID NO: 4801 - DNA, 33 bp, Sordaria macrospora
  source 1..33: mol_type = other DNA
tggtgccggatccatggccagtcgtgctggaag

SEQ ID NO: 4802 - DNA, 33 bp, Sordaria macrospora; identical to SEQ ID NO: 4801
  source 1..33: mol_type = other DNA

SEQ ID NO: 4803 - DNA, 36 bp, Sordaria macrospora
  source 1..36: mol_type = other DNA
tggtgccggatccatggccagtcttgctggaagaag

SEQ ID NO: 4804 - DNA, 36 bp, Sordaria macrospora; identical to SEQ ID NO: 4803
  source 1..36: mol_type = other DNA

SEQ ID NO: 4805 - DNA, 39 bp, Sordaria macrospora
  source 1..39: mol_type = other DNA
tggtgccggatccatggccagtcttgctggaagaagaga

SEQ ID NO: 4806 - DNA, 39 bp, Sordaria macrospora; identical to SEQ ID NO: 4805
  source 1..39: mol_type = other DNA

SEQ ID NO: 4807 - DNA, 36 bp, Cytospora leucostoma
  source 1..36: mol_type = other DNA
tggtgcctcctcaagggccaggggtgctggaagcgg

SEQ ID NO: 4808 - DNA, 33 bp, Coniella lustricola; identical to SEQ ID NO: 3757
  source 1..33: mol_type = other DNA

SEQ ID NO: 4809 - DNA, 36 bp, Coniella lustricola
  source 1..36: mol_type = other DNA
tggtgcctcttccacggtgagggctgctggaagcgc

SEQ ID NO: 4810 - DNA, 33 bp, Valsa sordida
  source 1..33: mol_type = other DNA
tggtgcctgctcaagggccaaggctgctggaag

SEQ ID NO: 4811 - DNA, 36 bp, Valsa sordida; identical to SEQ ID NO: 4382
  source 1..36: mol_type = other DNA

SEQ ID NO: 4812 - DNA, 36 bp, Valsa sordida
  source 1..36: mol_type = other DNA
tggtgcctgctcaagggccagggatgctggaagcgc

SEQ ID NO: 4813 - DNA, 33 bp, Valsa mali
  source 1..33: mol_type = other DNA
tggtgcctgttcaagggcgagggatgctggaag

SEQ ID NO: 4814 - DNA, 36 bp, Valsa mali
  source 1..36: mol_type = other DNA
tggtgcctgttcaagggcgagggatgctggaagcgc

SEQ ID NO: 4815 - DNA, 33 bp, Coniella lustricola
  source 1..33: mol_type = other DNA
tggtgcctgttccacggcgagggctgctggaag

SEQ ID NO: 4816 - DNA, 33 bp, Ustilaginoidea virens
  source 1..33: mol_type = other DNA
tggtgcgaccggcccggagagccatgctggaag

SEQ ID NO: 4817 - DNA, 36 bp, Ustilaginoidea virens
  source 1..36: mol_type = other DNA
tggtgcgaccggcccggagagccatgctggaagaga

SEQ ID NO: 4818 - DNA, 33 bp, Botrytis elliptica
  source 1..33: mol_type = other DNA
tggtgcggacgcccaggacaaccatgcaagcga

SEQ ID NO: 4819 - DNA, 33 bp, Rutstroemia sp.
  source 1..33: mol_type = other DNA; note = NJR-2017a BBW
tggtgcggacgcccaggccaaccctgcaaacgt

SEQ ID NO: 4820 - DNA, 27 bp, Botrytis hyacinthi
  source 1..27: mol_type = other DNA
tggtgcggacgccccggacaaccatgc

SEQ ID NO: 4821 - DNA, 30 bp, Botryotinia convoluta; identical to SEQ ID NO: 4258
  source 1..30: mol_type = other DNA

SEQ ID NO: 4822 - DNA, 30 bp, Botrytis hyacinthi; identical to SEQ ID NO: 4258
  source 1..30: mol_type = other DNA

SEQ ID NO: 4823 - DNA, 39 bp, Botryotinia convoluta
  source 1..39: mol_type = other DNA
tggtgcggacgccccggacaaccatgcaaggagaagcgt

SEQ ID NO: 4824 - DNA, 39 bp, Botrytis hyacinthi; identical to SEQ ID NO: 4823
  source 1..39: mol_type = other DNA

SEQ ID NO: 4825 - DNA, 30 bp, Sclerotinia sclerotiorum; identical to SEQ ID NO: 385
  source 1..30: mol_type = other DNA

SEQ ID NO: 4826 - DNA, 33 bp, Sclerotinia sclerotiorum
  source 1..33: mol_type = other DNA
tggtgcggacgccccggacaaccctgcaaacgt

SEQ ID NO: 4827 - DNA, 33 bp, Monilinia laxa
  source 1..33: mol_type = other DNA
tggtgcggacgccccggacaaggatgcaagcgt

SEQ ID NO: 4828 - DNA, 30 bp, Botryotinia calthae; identical to SEQ ID NO: 939
  source 1..30: mol_type = other DNA

SEQ ID NO: 4829 - DNA, 30 bp, Botryotinia calthae; identical to SEQ ID NO: 939
  source 1..30: mol_type = other DNA

SEQ ID NO: 4830 - DNA, 30 bp, Botrytis paeoniae; identical to SEQ ID NO: 939
  source 1..30: mol_type = other DNA

SEQ ID NO: 4831 - DNA, 30 bp, Botrytis paeoniae; identical to SEQ ID NO: 939
  source 1..30: mol_type = other DNA

SEQ ID NO: 4832 - DNA, 33 bp, Botrytis porri
  source 1..33: mol_type = other DNA
tggtgcggacgccccggtcaaccatgcaagcgc

SEQ ID NO: 4833 - DNA, 39 bp, Botryotinia calthae
  source 1..39: mol_type = other DNA
tggtgcggacgccccggtcaaccatgcaaggagaagcgc

SEQ ID NO: 4834 - DNA, 30 bp, Sclerotinia borealis
  source 1..30: mol_type = other DNA
tggtgcggacgccctggacaaccatgtaag

SEQ ID NO: 4835 - DNA, 30 bp, Sclerotinia borealis; identical to SEQ ID NO: 619
  source 1..30: mol_type = other DNA

SEQ ID NO: 4836 - DNA, 42 bp, Rutstroemia sp.
  source 1..42: mol_type = other DNA; note = NJR-2017a BVV2
tggtgcggacgtcccggacagccctgccgtaaagtgcgtcgt

SEQ ID NO: 4837 - DNA, 30 bp, Rutstroemia sp.
  source 1..30: mol_type = other DNA; note = NJR-2017a BVV2
tggtgcggccgcccaggccaaccctgcaag

SEQ ID NO: 4838 - DNA, 33 bp, Rutstroemia sp.
  source 1..33: mol_type = other DNA; note = NJR-2017a BVV2
tggtgcggccgcccaggccaaccctgcaagcgc

SEQ ID NO: 4839 - DNA, 39 bp, Rutstroemia sp.
  source 1..39: mol_type = other DNA; note = NJR-2017a BBW
tggtgcggccgccccgggcaaccctgcaaagagaagcgc

SEQ ID NO: 4840 - DNA, 33 bp, Zymoseptoria brevis
  source 1..33: mol_type = other DNA
tggtgcggtgccatcggcgctccttgtgccaaa

SEQ ID NO: 4841 - DNA, 33 bp, Zymoseptoria brevis
  source 1..33: mol_type = other DNA
tggtgcggtgccattggtgcaccttgcgccaag

SEQ ID NO: 4842 - DNA, 33 bp, Zymoseptoria brevis; identical to SEQ ID NO: 4841
  source 1..33: mol_type = other DNA

SEQ ID NO: 4843 - DNA, 33 bp, Zymoseptoria brevis; identical to SEQ ID NO: 4841
  source 1..33: mol_type = other DNA

SEQ ID NO: 4844 - DNA, 42 bp, Trichoderma harzianum
  source 1..42: mol_type = other DNA
tggtgctaccgcatcggagagagttgctggattcccaagcga

SEQ ID NO: 4845 - DNA, 42 bp, Trichoderma arundinaceum
  source 1..42: mol_type = other DNA
tggtgctaccgcatcggccagccttgctggaaggccaagcga

SEQ ID NO: 4846 - DNA, 42 bp, Trichoderma longibrachiatum
  source 1..42: mol_type = other DNA
tggtgctaccgcatcggcgagccttgctggaaggccaagcgc

SEQ ID NO: 4847 - DNA, 42 bp, Trichoderma reesei; identical to SEQ ID NO: 4846
  source 1..42: mol_type = other DNA

SEQ ID NO: 4848 - DNA, 45 bp, Trichoderma virens
  source 1..45: mol_type = other DNA
tggtgctaccgcgttggtatgacttgcggctggaagaagaagaga

SEQ ID NO: 4849 - DNA, 42 bp, Coniochaeta sp.
  source 1..42: mol_type = other DNA; note = 2T2.1
tggtgctccgtcaagggcgagccgtgctggaagagcaagcgc

SEQ ID NO: 4850 - DNA, 33 bp, Metarhizium acridum
  source 1..33: mol_type = other DNA
tggtgctggcagcctggtcagccttgctggaag

SEQ ID NO: 4851 - DNA, 36 bp, Metarhizium acridum
  source 1..36: mol_type = other DNA
tggtgctggcagcctggtcagccttgctggaagaga

SEQ ID NO: 4852 - DNA, 42 bp, Trichoderma gamsii
  source 1..42: mol_type = other DNA
tggtgctggcgagtaggcgagtcttgctggaaggccaagcgc

SEQ ID NO: 4853 - DNA, 33 bp, Pochonia chlamydosporia
  source 1..33: mol_type = other DNA
tggtgctggcgtccaggccagccctgctggaag

SEQ ID NO: 4854 - DNA, 36 bp, Pochonia chlamydosporia
  source 1..36: mol_type = other DNA
tggtgctggcgtccaggccagccctgctggaagaga

SEQ ID NO: 4855 - DNA, 33 bp, Pochonia chlamydosporia
  source 1..33: mol_type = other DNA
tggtgctggcgtccaggccagtcctgctggaag

SEQ ID NO: 4856 - DNA, 36 bp, Pochonia chlamydosporia
  source 1..36: mol_type = other DNA
tggtgctggcgtccaggccagtcctgctggaagaga

SEQ ID NO: 4857 - DNA, 18 bp, Beauveria brongniartii
  source 1..18: mol_type = other DNA
tggtgcttacggcccggg

SEQ ID NO: 4858 - DNA, 18 bp, Beauveria brongniartii
  source 1..18: mol_type = other DNA
tggtgcttacggcccggg

SEQ ID NO: 4859 - DNA, 32 bp, Diaporthe ampelina
  source 1..32: mol_type = other DNA
tggtgcttctggaagggcaaggttgctggaag

SEQ ID NO: 4860 - DNA, 36 bp, Diaporthe ampelina
  source 1..36: mol_type = other DNA
tggtgcttctggaagggccaaggttgctggaagcgc

SEQ ID NO: 4861 - DNA, 30 bp, Botryotinia convoluta
  source 1..30: mol_type = other DNA
tggtgtggacgcccaggacaaccctgcaga

SEQ ID NO: 4862 - DNA, 27 bp, Sclerotinia borealis
  source 1..27: mol_type = other DNA
tggtgtggacgtcctggacaaccttgc

SEQ ID NO: 4863 - DNA, 42 bp, Coniochaeta sp.
  source 1..42: mol_type = other DNA; note = 2T2.1
tggtgttccgtcaagggcgagccgtgctacaagagcaagcgc

SEQ ID NO: 4864 - DNA, 33 bp, Pochonia chlamydosporia
  source 1..33: mol_type = other DNA
tggtgttggagacccggccagccatgctggaag

SEQ ID NO: 4865 - DNA, 42 bp, Pochonia chlamydosporia
  source 1..42: mol_type = other DNA
tggtgttggagacccggccagccatgctggaaggcgaagcgt

SEQ ID NO: 4866 - DNA, 39 bp, Hyaloscypha bicolor
  source 1..39: mol_type = other DNA
tgtggagcaagaggtcaaccctgtggaaaggccaagcgt

SEQ ID NO: 4867 - DNA, 39 bp, Chalara longipes
  source 1..39: mol_type = other DNA
tgtggagctcgaggacaaccctgtggcaaggccaagcgt

SEQ ID NO: 4868 - DNA, 27 bp, Chlorociboria aeruginascens
  source 1..27: mol_type = other DNA
tgtgggaggcccggtcaggggtgcaaa

SEQ ID NO: 4869 - DNA, 30 bp, Chlorociboria aeruginascens
  source 1..30: mol_type = other DNA
tgtgggaggcccggtcaggggtgcaaaaga

SEQ ID NO: 4870 - DNA, 42 bp, Chlorociboria aeruginascens
  source 1..42: mol_type = other DNA
tgtggtcgacccggtcaaggttgcaaggacaaagccaagaga

SEQ ID NO: 4871 - DNA, 30 bp, Lachnellula suecica
  source 1..30: mol_type = other DNA
tgtggtgcccgaggccaaggttgctacaag

SEQ ID NO: 4872 - DNA, 30 bp, Lachnellula suecica; identical to SEQ ID NO: 4871
  source 1..30: mol_type = other DNA

SEQ ID NO: 4873 - DNA, 30 bp, Lachnellula suecica; identical to SEQ ID NO: 4871
  source 1..30: mol_type = other DNA

SEQ ID NO: 4874 - DNA, 42 bp, Sporothrix insectorum
  source 1..42: mol_type = other DNA
ttctgcatgtggtttggccagtcctgctggaaggtcaagcgc

SEQ ID NO: 4875 - DNA, 42 bp, Ramularia collo-cygni
  source 1..42: mol_type = other DNA
ttctgcggtcctcgcggcgtctcctgcgcaaaggtcaagcgt

SEQ ID NO: 4876 - DNA, 36 bp, Diplodia corticola
  source 1..36: mol_type = other DNA
ttctgcggtcgtatcaggggccagccctgccacaag

SEQ ID NO: 4877 - DNA, 42 bp, Diplodia corticola
  source 1..42: mol_type = other DNA
ttctgcggtcgtatcaggggccagccctgccacaagaagcgc

SEQ ID NO: 4878 - DNA, 42 bp, Pseudogymnoascus sp.
  source 1..42: mol_type = other DNA; note = VKM F-4518 (FW-2643)
ttctgctggcgccctggccagccatgtggcaaggtcaagcgc

SEQ ID NO: 4879 - DNA, 42 bp, Pseudogymnoascus sp.
  source 1..42: mol_type = other DNA; note = VKM F-4518 (FW-2643)
ttctgctggcgtcctggccagccatgcggcaaagctaagcgt

SEQ ID NO: 4880 - DNA, 42 bp, Ramularia collo-cygni
  source 1..42: mol_type = other DNA
ttctgtggtccccgaggtgtctcctgcgccaaggccaagcgt

SEQ ID NO: 4881 - DNA, 18 bp, Verticillium alfalfae
  source 1..18: mol_type = other DNA
ttgccctggtcgaggaca

SEQ ID NO: 4882 - DNA, 18 bp, Verticillium alfalfae
  source 1..18: mol_type = other DNA
ttgccctggtcgaggaca

SEQ ID NO: 4883 - DNA, 18 bp, Glarea lozoyensis
  source 1..18: mol_type = other DNA
ttgtccatgacgctggca

SEQ ID NO: 4884 - DNA, 18 bp, Glarea lozoyensis
  source 1..18: mol_type = other DNA
ttgtccatggcgctggca

SEQ ID NO: 4885 - DNA, 21 bp, Glarea lozoyensis
  source 1..21: mol_type = other DNA
ttgtccatggcgctggcattg

SEQ ID NO: 4886 - DNA, 21 bp, Glarea lozoyensis
  source 1..21: mol_type = other DNA
ttgtccatggcgctggcattg

SEQ ID NO: 4887 - DNA, 18 bp, Glarea lozoyensis
  source 1..18: mol_type = other DNA
ttgtccgtgtctgatgca

SEQ ID NO: 4888 - DNA, 18 bp, Glarea lozoyensis
  source 1..18: mol_type = other DNA
ttgtccgtgtctgatgca

SEQ ID NO: 4889 - DNA, 33 bp, Neofusicoccum parvum
  source 1..33: mol_type = other DNA
tttcgagcagggctgacccttccagcgacacca

SEQ ID NO: 4890 - DNA, 33 bp, Zymoseptoria tritici
  source 1..33: mol_type = other DNA
tttggcacaaggagcgccgatggcaccgcacca

SEQ ID NO: 4891 - DNA, 33 bp, Zymoseptoria tritici; identical to SEQ ID NO: 4890
  source 1..33: mol_type = other DNA

SEQ ID NO: 4892 - DNA, 33 bp, Zymoseptoria tritici; identical to SEQ ID NO: 4890
  source 1..33: mol_type = other DNA

SEQ ID NO: 4893 - DNA, 33 bp, Zymoseptoria tritici; identical to SEQ ID NO: 4890
  source 1..33: mol_type = other DNA

SEQ ID NO: 4894 - DNA, 42 bp, Lasiodiplodia theobromae
  source 1..42: mol_type = other DNA
acgcttcttgtggcagggctgaccgcggatacggccacagaa

SEQ ID NO: 4895 - DNA, 42 bp, Lasiodiplodia theobromae; identical to SEQ ID NO: 4894
  source 1..42: mol_type = other DNA

SEQ ID NO: 4896 - DNA, 42 bp, Botrytis fragariae; identical to SEQ ID NO: 3655
  source 1..42: mol_type = other DNA

SEQ ID NO: 4897 - DNA, 33 bp, Monilinia fructigena
  source 1..33: mol_type = other DNA
acgcttgcatccttgtccgggacgtccgcacca

SEQ ID NO: 4898 - DNA, 33 bp, Botrytis fragariae
  source 1..33: mol_type = other DNA
acgcttgcatggttgaccgggtctagaagcata

SEQ ID NO: 4899 - DNA, 33 bp, Botrytis tulipae; identical to SEQ ID NO: 3626
  source 1..33: mol_type = other DNA

SEQ ID NO: 4900 - DNA, 33 bp, Botrytis cinerea; identical to SEQ ID NO: 3626
  source 1..33: mol_type = other DNA

SEQ ID NO: 4901 - DNA, 33 bp, Botrytis cinerea; identical to SEQ ID NO: 3626
  source 1..33: mol_type = other DNA

SEQ ID NO: 4902 - DNA, 33 bp, Botrytis cinerea; identical to SEQ ID NO: 3626
  source 1..33: mol_type = other DNA

SEQ ID NO: 4903 - DNA, 39 bp, Marssonina coronariae
  source 1..39: mol_type = other DNA
acgcttggcctttccgcatggctgtccgggttttccgca

SEQ ID NO: 4904 - DNA, 39 bp, Helotiales sp.
  source 1..39: mol_type = other DNA; note = DMI_Dod_QoI
acgcttggcctttccgcatggttgacctgggtatccgca

SEQ ID NO: 4905 - DNA, 39 bp, Pseudogymnoascus sp.
  source 1..39: mol_type = other DNA; note = VKM F-4514 (FW-929)
acgcttggctttaccgcatggctgaccgggacgccagca

SEQ ID NO: 4906 - DNA, 42 bp, Pseudogymnoascus sp.
  source 1..42: mol_type = other DNA; note = VKM F-4514 (FW-929)
acgcttggctttaccgcatggctgaccgggacgccagcagat

SEQ ID NO: 4907 - DNA, 39 bp, Pseudogymnoascus sp.
  source 1..39: mol_type = other DNA; note = VKM F-4246
acgcttggctttgccgcagggttgacccggaagccagca

SEQ ID NO: 4908 - DNA, 39 bp, Pseudogymnoascus sp.; identical to SEQ ID NO: 4907
  source 1..39: mol_type = other DNA; note = VKM F-4513 (FW-928)

SEQ ID NO: 4909 - DNA, 42 bp, Lophiostoma macrostomum
  source 1..42: mol_type = other DNA
acgcttggctttgccgcatggctgaccacggtagtggcagaa

SEQ ID NO: 4910 - DNA, 42 bp, Aspergillus mulundensis
  source 1..42: mol_type = other DNA
acgctttgacttatggcagacctgtccgggccacctgcacca

SEQ ID NO: 4911 - DNA, 39 bp, Mollisia scopiformis
  source 1..39: mol_type = other DNA
acgctttgctttgccacatggctgtcctgggtaaccaca

SEQ ID NO: 4912 - DNA, 39 bp, Lophium mytilinum
  source 1..39: mol_type = other DNA
acgcttttccttggagcaagattggcctgggagatggca

SEQ ID NO: 4913 - DNA, 33 bp, Botrytis galanthina
  source 1..33: mol_type = other DNA
acgtttacatggttgtccggggcgtccgcacca

SEQ ID NO: 4914 - DNA, 33 bp, Sclerotinia sclerotiorum
  source 1..33: mol_type = other DNA
acgtttgcatggttgtccgggacgtccgcacca

SEQ ID NO: 4915 - DNA, 27 bp, Lindgomyces ingoldianus
  source 1..27: mol_type = other DNA
agagcatggctggccgacgaggcggca

SEQ ID NO: 4916 - DNA, 30 bp, Lindgomyces ingoldianus
  source 1..30: mol_type = other DNA
agagcatggctggccgacgaggcggcaacg

SEQ ID NO: 4917 - DNA, 39 bp, Botrytis cinerea
  source 1..39: mol_type = other DNA
agcctcgcgcttacatggctgtcctgggcgtccgcacca

SEQ ID NO: 4918 - DNA, 39 bp, Botrytis cinerea; identical to SEQ ID NO: 4917
  source 1..39: mol_type = other DNA

SEQ ID NO: 4919 - DNA, 39 bp, Botrytis cinerea; identical to SEQ ID NO: 4917
  source 1..39: mol_type = other DNA

SEQ ID NO: 4920 - DNA, 36 bp, Botrytis fragariae
  source 1..36: mol_type = other DNA
agtacgcttacatggttgaccagggcgtccacacca

SEQ ID NO: 4921 - DNA, 36 bp, Botrytis cinerea
  source 1..36: mol_type = other DNA
agtacgcttacatggttgaccgggacgtccacacca

SEQ ID NO: 4922 - DNA, 36 bp, Botrytis cinerea; identical to SEQ ID NO: 4921
  source 1..36: mol_type = other DNA

SEQ ID NO: 4923 - DNA, 36 bp, Botrytis cinerea
  source 1..36: mol_type = other DNA
agtacgcttacatggttgacctggacgtccacacca

SEQ ID NO: 4924 - DNA, 42 bp, Pseudogymnoascus sp.
  source 1..42: mol_type = other DNA; note = VKM F-3557
atctgctggcgtcccggtcagccatgcggtaaagccaagcgt

SEQ ID NO: 4925 - DNA, 42 bp, Pseudogymnoascus sp.; identical to SEQ ID NO: 4924
  source 1..42: mol_type = other DNA; note = VKM F-4516 (FW-969)

SEQ ID NO: 4926 - DNA, 42 bp, Pseudogymnoascus sp.
  source 1..42: mol_type = other DNA; note = VKM F-4519 (FW-2642)
atctgctggcgtcctggccagccatgcggcaaagctaagcgt

SEQ ID NO: 4927 - DNA, 42 bp, Pseudogymnoascus sp.; identical to SEQ ID NO: 4534
  source 1..42: mol_type = other DNA; note = VKM F-103

SEQ ID NO: 4928 - DNA, 42 bp, Pseudogymnoascus sp.
  source 1..42: mol_type = other DNA; note = 05NY08
atctgttggcgccctggccagccatgcggcaaagccaagcgc

SEQ ID NO: 4929 - DNA, 42 bp, Pseudogymnoascus sp.
  source 1..42: mol_type = other DNA; note = WSF 3629
atctgttggcgtccaggccagccatgtggcaaagccaagcgc

SEQ ID NO: 4930 - DNA, 42 bp, Pseudogymnoascus sp.
  source 1..42: mol_type = other DNA; note = 03VT05
atctgttggcgtccaggccagccgtgcggtaaagccaagcgc

SEQ ID NO: 4931 - DNA, 30 bp, Stachybotrys chlorohalonata; identical to SEQ ID NO: 4300
  source 1..30: mol_type = other DNA

SEQ ID NO: 4932 - DNA, 36 bp, Diaporthe helianthi
  source 1..36: mol_type = other DNA
ccgcttccagcacccctcgcccttccagaagcacca

SEQ ID NO: 4933 - DNA, 36 bp, Colletotrichum gloeosporioides; identical to SEQ ID NO: 3744
  source 1..36: mol_type = other DNA

SEQ ID NO: 4934 - DNA, 42 bp, Ophiocordyceps camponoti-floridani; identical to SEQ ID NO: 4549
  source 1..42: mol_type = other DNA

SEQ ID NO: 4935 - DNA, 42 bp, Ophiocordyceps camponoti-floridani
  source 1..42: mol_type = other DNA
cctcttgaccttggagcagatggagttgggacgtgtgcacca

SEQ ID NO: 4936 - DNA, 42 bp, Ophiocordyceps camponoti-floridani; identical to SEQ ID NO: 4935
  source 1..42: mol_type = other DNA

SEQ ID NO: 4937 - DNA, 42 bp, Ophiocordyceps camponoti-floridani; identical to SEQ ID NO: 4935
  source 1..42: mol_type = other DNA

SEQ ID NO: 4938 - DNA, 42 bp, Ophiocordyceps camponoti-floridani
  source 1..42: mol_type = other DNA
cctcttgaccttggagcagatggagttgggtcgcttgcacca

SEQ ID NO: 4939 - DNA, 33 bp, Monilinia fructicola
  source 1..33: mol_type = other DNA
cctcttgcatccttgtccggggcgtccacacca

SEQ ID NO: 4940 - DNA, 42 bp, Metarhizium anisopliae; identical to SEQ ID NO: 3969
  source 1..42: mol_type = other DNA

SEQ ID NO: 4941 - DNA, 42 bp, Metarhizium anisopliae; identical to SEQ ID NO: 3969
  source 1..42: mol_type = other DNA

SEQ ID NO: 4942 - DNA, 42 bp, Metarhizium anisopliae; identical to SEQ ID NO: 3969
  source 1..42: mol_type = other DNA

SEQ ID NO: 4943 - DNA, 42 bp, Metarhizium anisopliae; identical to SEQ ID NO: 3969
  source 1..42: mol_type = other DNA

SEQ ID NO: 4944 - DNA, 36 bp, Dothistroma septosporum
  source 1..36: mol_type = other DNA
cgatgcaccgtccctggtcttgcttgcggcaagcgg

SEQ ID NO: 4945 - DNA, 30 bp, Botrytis fragariae; identical to SEQ ID NO: 4556
  source 1..30: mol_type = other DNA

SEQ ID NO: 4946 - DNA, 30 bp, Botrytis cinerea
  source 1..30: mol_type = other DNA
cttacatggttgaccgggacgtccacacca

SEQ ID NO: 4947 - DNA, 30 bp, Botrytis cinerea; identical to SEQ ID NO: 4946
  source 1..30: mol_type = other DNA

SEQ ID NO: 4948 - DNA, 30 bp, Botrytis fragariae; identical to SEQ ID NO: 4946
  source 1..30: mol_type = other DNA

SEQ ID NO: 4949 - DNA, 30 bp, Botrytis cinerea
  source 1..30: mol_type = other DNA
cttacatggttgacctggacgtccacacca

SEQ ID NO: 4950 - DNA, 30 bp, Botrytis galanthina
  source 1..30: mol_type = other DNA
cttacatggttgtccgggacgtccgcacca

SEQ ID NO: 4951 - DNA, 30 bp, Botrytis tulipae; identical to SEQ ID NO: 4950
  source 1..30: mol_type = other DNA

SEQ ID NO: 4952 - DNA, 30 bp, Botryotinia narcissicola
  source 1..30: mol_type = other DNA
cttacatggttgtcctgggcgtccgcacca

SEQ ID NO: 4953 - DNA, 33 bp, Cryphonectria parasitica
  source 1..33: mol_type = other DNA
cttccagcaaccttcgccgtggaagaggcacca

SEQ ID NO: 4954 - DNA, 33 bp, Cryphonectria parasitica; identical to SEQ ID NO: 4565
  source 1..33: mol_type = other DNA

SEQ ID NO: 4955 - DNA, 33 bp, Neurospora crassa; identical to SEQ ID NO: 4569
  source 1..33: mol_type = other DNA

SEQ ID NO: 4956 - DNA, 33 bp, Neurospora crassa; identical to SEQ ID NO: 4569
  source 1..33: mol_type = other DNA

SEQ ID NO: 4957 - DNA, 33 bp, Pyricularia grisea
  source 1..33: mol_type = other DNA
cttccagcacggctggccgcggcgagggcacca

SEQ ID NO: 4958 - DNA, 33 bp, Diaporthe helianthi
  source 1..33: mol_type = other DNA
cttccagcagccctcacccttccagaagcacca

SEQ ID NO: 4959 - DNA, 33 bp, Valsa mali; identical to SEQ ID NO: 4573
  source 1..33: mol_type = other DNA

SEQ ID NO: 4960 - DNA, 33 bp, Cryphonectria parasitica
  source 1..33: mol_type = other DNA
cttccagcagccctcgccgtggaacaggcacca

SEQ ID NO: 4961 - DNA, 33 bp, Neurospora crassa; identical to SEQ ID NO: 4576
  source 1..33: mol_type = other DNA

SEQ ID NO: 4962 - DNA, 33 bp, Neurospora crassa; identical to SEQ ID NO: 4576
  source 1..33: mol_type = other DNA

SEQ ID NO: 4963 - DNA, 33 bp, Neurospora crassa
  source 1..33: mol_type = other DNA
cttccagcaggactggccgtggatgcggcacca

SEQ ID NO: 4964 - DNA, 33 bp, Neurospora crassa; identical to SEQ ID NO: 4963
  source 1..33: mol_type = other DNA

SEQ ID NO: 4965 - DNA, 33 bp, Neurospora crassa; identical to SEQ ID NO: 4963
  source 1..33: mol_type = other DNA

SEQ ID NO: 4966 - DNA, 33 bp, Neurospora crassa; identical to SEQ ID NO: 4963
  source 1..33: mol_type = other DNA

SEQ ID NO: 4967 - DNA, 33 bp, Pyricularia sp.
  source 1..33: mol_type = other DNA; note = CBS 133598
cttccagcagggctgaccgcggcgcgggcacca

SEQ ID NO: 4968 - DNA, 33 bp, Pyricularia oryzae; identical to SEQ ID NO: 4581
  source 1..33: mol_type = other DNA

SEQ ID NO: 4969 - DNA, 30 bp, Venustampulla echinocandica
  source 1..30: mol_type = other DNA
cttccagcatccttggccgacgtgggtaca

SEQ ID NO: 4970 - DNA, 36 bp, Venustampulla echinocandica
  source 1..36: mol_type = other DNA
cttctccttccagcagccttgtccaacatgggtaca

SEQ ID NO: 4971 - DNA, 36 bp, Mollisia scopiformis
  source 1..36: mol_type = other DNA
cttgactttgccacagggttggccggggtaaccgca

SEQ ID NO: 4972 - DNA, 30 bp, Botryotinia narcissicola
  source 1..30: mol_type = other DNA
cttgcatggttgaccggggcgtccgcacca

SEQ ID NO: 4973 - DNA, 30 bp, Sclerotinia sclerotiorum
  source 1..30: mol_type = other DNA
cttgcatggttggcctgggcgtccgcacca

SEQ ID NO: 4974 - DNA, 30 bp, Lindgomyces ingoldianus
  source 1..30: mol_type = other DNA
cttggagcatggctgaccaacaagacggca

SEQ ID NO: 4975 - DNA, 36 bp, Ophiocordyceps camponoti-floridani
  source 1..36: mol_type = other DNA
cttggggccacactgcgagttgggacgtgtgcacca

SEQ ID NO: 4976 - DNA, 36 bp, Lasiodiplodia theobromae
  source 1..36: mol_type = other DNA
cttgtggcaaggctggccgcggatgcggccgcagaa

SEQ ID NO: 4977 - DNA, 36 bp, Lasiodiplodia theobromae; identical to SEQ ID NO: 4976
  source 1..36: mol_type = other DNA

SEQ ID NO: 4978 - DNA, 42 bp, Pseudogymnoascus sp.
  source 1..42: mol_type = other DNA; note = 23342-1-I1
gcgcttagcctttccgcacggctgtccagggcgccagcagaa

SEQ ID NO: 4979 - DNA, 36 bp, Colletotrichum siamense
  source 1..36: mol_type = other DNA
gcgcttccagcaaggctggccaggcttcgtgcacca

SEQ ID NO: 4980 - DNA, 36 bp, Colletotrichum fructicola; identical to SEQ ID NO: 4605
  source 1..36: mol_type = other DNA

SEQ ID NO: 4981 - DNA, 36 bp, Colletotrichum fructicola; identical to SEQ ID NO: 4605
  source 1..36: mol_type = other DNA

SEQ ID NO: 4982 - DNA, 36 bp, Colletotrichum fructicola; identical to SEQ ID NO: 4605
  source 1..36: mol_type = other DNA

SEQ ID NO: 4983 - DNA, 36 bp, Pyricularia oryzae
  source 1..36: mol_type = other DNA
gcgcttccagcaaggctggcctcggcgcgggcacca

SEQ ID NO: 4984 - DNA, 36 bp, Valsa mali
  source 1..36: mol_type = other DNA
gcgcttccagcacccttcacccttgaacaggcacca

SEQ ID NO: 4985 - DNA, 36 bp, Pyricularia grisea
  source 1..36: mol_type = other DNA
gcgcttccagcacggctggccccggcgtgggcacca

SEQ ID NO: 4986 - DNA, 36 bp, Colletotrichum siamense
  source 1..36: mol_type = other DNA
gcgcttccagcacggttggccgggcttggtgcacca

SEQ ID NO: 4987 - DNA, 36 bp, Colletotrichum siamense; identical to SEQ ID NO: 4986
  source 1..36: mol_type = other DNA

SEQ ID NO: 4988 - DNA, 36 bp, Colletotrichum siamense; identical to SEQ ID NO: 4986
  source 1..36: mol_type = other DNA

SEQ ID NO: 4989 - DNA, 36 bp, Sporothrix brasiliensis; identical to SEQ ID NO: 4609
  source 1..36: mol_type = other DNA

SEQ ID NO: 4990 - DNA, 36 bp, Pyricularia sp.
  source 1..36: mol_type = other DNA; note = CBS 133598
gcgcttccagcagggctgaccgcggcgcgggcacca

SEQ ID NO: 4991 - DNA, 36 bp, Colletotrichum viniferum
  source 1..36: mol_type = other DNA
gcgcttccagcagggctggccgggcttagtgcacca

SEQ ID NO: 4992 - DNA, 42 bp, Stachybotrys chlorohalonata
  source 1..42: mol_type = other DNA
gcgcttcgctttccagcaaggctgcccaggacgggtgcacca

SEQ ID NO: 4993 - DNA, 42 bp, Delitschia confertaspora
  source 1..42: mol_type = other DNA
gcgcttctccttggagcaggactggccggggaagcggcagtt

SEQ ID NO: 4994 - DNA, 39 bp, Rutstroemia sp.
  source 1..39: mol_type = other DNA; note = NJR-2017a WRK4
gcgcttctctttgcagggttgcccggggcggccgcacca

SEQ ID NO: 4995 - DNA, 42 bp, Ophiostoma piceae
  source 1..42: mol_type = other DNA
gcgcttgaccttccagcagggctggccgaccatggggcacca

SEQ ID NO: 4996 - DNA, 39 bp, Helotiales sp.
  source 1..39: mol_type = other DNA; note = DMI_Dod_QoI
gcgcttgactttaccgcatggctgaccggggtatccaca

SEQ ID NO: 4997 - DNA, 39 bp, Pseudogymnoascus verrucosus
  source 1..39: mol_type = other DNA
gcgcttgactttgccgcagggctggccggggcgccagca

SEQ ID NO: 4998 - DNA, 39 bp, Pseudogymnoascus sp.; identical to SEQ ID NO: 4997
  source 1..39: mol_type = other DNA; note = 24MN13

SEQ ID NO: 4999 - DNA, 42 bp, Trichoderma asperellum
  source 1..42: mol_type = other DNA
gcgcttggccttccagcaagactcgccaactcgccagcacca

SEQ ID NO: 5000 - DNA, 42 bp, Trichoderma asperellum; identical to SEQ ID NO: 4999
  source 1..42: mol_type = other DNA

SEQ ID NO: 5001 - DNA, 42 bp, Trichoderma atroviride
  source 1..42: mol_type = other DNA
gcgcttggccttccagcaagactcgcccactcgccagcacca

SEQ ID NO: 5002 - DNA, 42 bp, Trichoderma gamsii; identical to SEQ ID NO: 5001
  source 1..42: mol_type = other DNA

SEQ ID NO: 5003 - DNA, 42 bp, Stachybotrys chartarum
  source 1..42: mol_type = other DNA
gcgcttggccttccagcacggctgcccgggacgtgtgcacca

SEQ ID NO: 5004 - DNA, 42 bp, Stachybotrys chartarum; identical to SEQ ID NO: 5003
  source 1..42: mol_type = other DNA

SEQ ID NO: 5005 - DNA, 42 bp, Neofusicoccum parvum
  source 1..42: mol_type = other DNA
gcgcttggccttcgagcaaggctggcccttccagcggcacca

SEQ ID NO: 5006 - DNA, 24 bp, Pseudogymnoascus sp.
  source 1..24: mol_type = other DNA; note = 24MN13
gcgcttggctttgccgcacggctg

SEQ ID NO: 5007 - DNA, 39 bp, Pseudogymnoascus verrucosus
  source 1..39: mol_type = other DNA
gcgcttggctttgccgcacggctggcctggacgccagca

SEQ ID NO: 5008 - DNA, 42 bp, Pseudogymnoascus verrucosus
  source 1..42: mol_type = other DNA
gcgcttggctttgccgcacggctggcctggacgccagcagat

SEQ ID NO: 5009 - DNA, 42 bp, Pseudogymnoascus sp.; identical to SEQ ID NO: 5008
  source 1..42: mol_type = other DNA; note = 24MN13

SEQ ID NO: 5010 - DNA, 39 bp, Lophium mytilinum
  source 1..39: mol_type = other DNA
gcgcttgtccttgctgcaagactggcctggaagatggca

SEQ ID NO: 5011 - DNA, 45 bp, Lophium mytilinum
  source 1..45: mol_type = other DNA
gcgcttgtctttgctgcaagactggcctgggagatgacaacccca

SEQ ID NO: 5012 - DNA, 39 bp, Drechmeria coniospora
  source 1..39: mol_type = other DNA
gcgtttcttccagcatccgcttccgggacgggtgcacca

SEQ ID NO: 5013 - DNA, 33 bp, Rutstroemia sp.
  source 1..33: mol_type = other DNA; note = NJR-2017a WRK4
gcgtttgcagggttgcccgggacggccgcacca

SEQ ID NO: 5014 - DNA, 42 bp, Pseudogymnoascus sp.
  source 1..42: mol_type = other DNA; note = VKM F-4517 (FW-2822)
gcgtttggccttcccgcagggctggcctggacgccagcagta

SEQ ID NO: 5015 - DNA, 30 bp, Cenococcum geophilum
  source 1..30: mol_type = other DNA
ggctgccatcttcccggccaatcttgcggt

SEQ ID NO: 5016 - DNA, 42 bp, Mytilinidion resinicola
  source 1..42: mol_type = other DNA
tactgccatctccccggccagtcttgcagcaaggacaaacgc

SEQ ID NO: 5017 - DNA, 42 bp, Pseudogymnoascus sp.
  source 1..42: mol_type = other DNA; note = VKM F-4515 (FW-2607)
tactgctggcgtcctggccagccatgcggcaaggccaagcgt

SEQ ID NO: 5018 - DNA, 39 bp, Botryosphaeria dothidea
  source 1..39: mol_type = other DNA
tactgtcacttccgcggctccgcctgtcctaagaagcgt

SEQ ID NO: 5019 - DNA, 39 bp, Botryosphaeria dothidea; identical to SEQ ID NO: 5018
  source 1..39: mol_type = other DNA

SEQ ID NO: 5020 - DNA, 42 bp, Trichoderma harzianum
  source 1..42: mol_type = other DNA
tcgcttggggatccagcaaggcattccgatgcggtagcacca

SEQ ID NO: 5021 - DNA, 36 bp, Metarhizium rileyi
  source 1..36: mol_type = other DNA
tctcttccagcaaggctgtcctggtcgccagcacca

SEQ ID NO: 5022 - DNA, 36 bp, Metarhizium rileyi; identical to SEQ ID NO: 5021
  source 1..36: mol_type = other DNA

SEQ ID NO: 5023 - DNA, 42 bp, Aspergillus fumigatiaffinis; identical to SEQ ID NO: 3424
  source 1..42: mol_type = other DNA

SEQ ID NO: 5024 - DNA, 42 bp, Aspergillus fumigatiaffinis; identical to SEQ ID NO: 3424
  source 1..42: mol_type = other DNA

SEQ ID NO: 5025 - DNA, 39 bp, Lachnellula willkommii; identical to SEQ ID NO: 4676
  source 1..39: mol_type = other DNA

SEQ ID NO: 5026 - DNA, 39 bp, Lachnellula subtilissima; identical to SEQ ID NO: 4676
  source 1..39: mol_type = other DNA

SEQ ID NO: 5027 - DNA, 42 bp, Drechmeria coniospora
  source 1..42: mol_type = other DNA
tctcttgaccttccagcaaccacttccggggcgagtgcacca

SEQ ID NO: 5028 - DNA, 30 bp, Coleophoma cylindrospora
  source 1..30: mol_type = other DNA
tctcttgcatggttgacccatacgtccgca

SEQ ID NO: 5029 - DNA, 45 bp, Tothia fuscella
  source 1..45: mol_type = other DNA
tctcttggcctttccacatggctggccacgacggaagcatcgcca

SEQ ID NO: 5030 - DNA, 39 bp, Venustampulla echinocandica
  source 1..39: mol_type = other DNA
tctcttgtctttccagcagccctggccgacgtgggtgca

SEQ ID NO: 5031 - DNA, 30 bp, Sodiomyces alkalinus
  source 1..30: mol_type = other DNA
tgcaccaagcccgggcagccttgctggaag

SEQ ID NO: 5032 - DNA, 39 bp, Sodiomyces alkalinus
  source 1..39: mol_type = other DNA
tgcaccaagcccggtcaaccgtgctggaagaacaagcgt

SEQ ID NO: 5033 - DNA, 33 bp, Dothistroma septosporum
  source 1..33: mol_type = other DNA
tgcaccgtccccggtcttgcctgcggtaagcgc

SEQ ID NO: 5034 - DNA, 39 bp, Mytilinidion resinicola
  source 1..39: mol_type = other DNA
tgccatctccccggccaatcttgcagcaaagataaacgc

SEQ ID NO: 5035 - DNA, 39 bp, Glonium stellatum
  source 1..39: mol_type = other DNA
tgccatcttcccggtcaatcatgccccaaggacaagcgt

SEQ ID NO: 5036 - DNA, 36 bp, Polyplosphaeria fusca
  source 1..36: mol_type = other DNA
tgccgcttcccaggctcgttctgcggcaagaagagg

SEQ ID NO: 5037 - DNA, 36 bp, Lophiotrema nucula
  source 1..36: mol_type = other DNA
tgccgcttcccgggacaaccatgctccaagaagcgt

SEQ ID NO: 5038 - DNA, 39 bp, Diplocarpon rosae
  source 1..39: mol_type = other DNA
tgcggacacccaggccagccctgtggtaaggcaaagcgc

SEQ ID NO: 5039 - DNA, 39 bp, Diplocarpon rosae
  source 1..39: mol_type = other DNA
tgcggacaccccggacaaccttgcggcaaggccaagcgt

SEQ ID NO: 5040 - DNA, 39 bp, Amorphotheca resinae
  source 1..39: mol_type = other DNA
tgcggcaaggtcggacaaccctgtggaaaggcaaagcgt

SEQ ID NO: 5041 - DNA, 30 bp, Cadophora sp.
  source 1..30: mol_type = other DNA; note = DSE1049
tgcgggcaccccggacaaccttgcggcaag

SEQ ID NO: 5042 - DNA, 33 bp, Cadophora sp.
  source 1..33: mol_type = other DNA; note = DSE1049
tgcgggcaccccggacaaccttgcggcaagcgc

SEQ ID NO: 5043 - DNA, 39 bp, Pseudogymnoascus sp.
  source 1..39: mol_type = other DNA; note = VKM F-3557
tgctggcgtccaggtcaaccatgtggcaaggccaagcgt

SEQ ID NO: 5044 - DNA, 39 bp, Pseudogymnoascus sp.; identical to SEQ ID NO: 5043
  source 1..39: mol_type = other DNA; note = VKM F-4516 (FW-969)

SEQ ID NO: 5045 - DNA, 39 bp, Pseudogymnoascus sp.; identical to SEQ ID NO: 4721
  source 1..39: mol_type = other DNA; note = VKM F-103

SEQ ID NO: 5046 - DNA, 39 bp, Pseudogymnoascus sp.; identical to SEQ ID NO: 4721
  source 1..39: mol_type = other DNA; note = 03VT05

SEQ ID NO: 5047 - DNA, 39 bp, Pseudogymnoascus sp.; identical to SEQ ID NO: 4721
  source 1..39: mol_type = other DNA; note = VKM F-4519 (FW-2642)

SEQ ID NO: 5048 - DNA, 39 bp, Pseudogymnoascus sp.; identical to SEQ ID NO: 4721
  source 1..39: mol_type = other DNA; note = 05NY08

SEQ ID NO: 5049 - DNA, 39 bp, Pseudogymnoascus sp.
  source 1..39: mol_type = other DNA; note = VKM F-4519 (FW-2642)
tgctggcgtcctggccagccatgcggcaaagctaagcgt

SEQ ID NO: 5050 - DNA, 39 bp, Pseudogymnoascus sp.; identical to SEQ ID NO: 4722
  source 1..39: mol_type = other DNA; note = VKM F-103

SEQ ID NO: 5051 - DNA, 42 bp, Zasmidium cellare
  source 1..42: mol_type = other DNA; strain = ATCC 36951
tggaagtgtggtgtccccggccaggcctgcaacaagaagcgc

SEQ ID NO: 5052 - DNA, 27 bp, Aspergillus lentulus
  source 1..27: mol_type = other DNA
tggacacatgcgagtgggcaaggatcg

SEQ ID NO: 5053 - DNA, 27 bp, Aspergillus lentulus
  source 1..27: mol_type = other DNA
tggacacatgcgagtgggcaaggatcg

SEQ ID NO: 5054 - DNA, 36 bp, Aspergillus lentulus
  source 1..36: mol_type = other DNA
tggacacatgcgagtgggcaaggatcgcgaatcatg

SEQ ID NO: 5055 - DNA, 36 bp, Aspergillus lentulus; identical to SEQ ID NO: 5054
  source 1..36: mol_type = other DNA

SEQ ID NO: 5056 - DNA, 45 bp, Mytilinidion resinicola
  source 1..45: mol_type = other DNA
tggggttgccatcttccgggccagtcttgcagcaaggacaagcgc

SEQ ID NO: 5057 - DNA, 42 bp, Coniochaeta ligniaria
  source 1..42: mol_type = other DNA
tggtgcaacatccgtggcgagccctgctggaagagcaagcgg

SEQ ID NO: 5058 - DNA, 33 bp, Purpureocillium lilacinum
  source 1..33: mol_type = other DNA
tggtgcaaccgccctggccagccctgcaagcgg

SEQ ID NO: 5059 - DNA, 33 bp, Purpureocillium lilacinum; identical to SEQ ID NO: 5058
  source 1..33: mol_type = other DNA

SEQ ID NO: 5060 - DNA, 33 bp, Purpureocillium lilacinum; identical to SEQ ID NO: 5058
  source 1..33: mol_type = other DNA

SEQ ID NO: 5061 - DNA, 42 bp, Escovopsis weberi
  source 1..42: mol_type = other DNA
tggtgcaccaacccgggccagggctgctggaaggccaagcgt

SEQ ID NO: 5062 - DNA, 36 bp, Colletotrichum tropicale
  source 1..36: mol_type = other DNA
tggtgcaccaagcccggccagccctgctggaaacgc

SEQ ID NO: 5063 - DNA, 36 bp, Colletotrichum aenigma
  source 1..36: mol_type = other DNA
tggtgcaccaagcccggccagccctgctggaagcgc

SEQ ID NO: 5064 - DNA, 42 bp, Madurella mycetomatis
  source 1..42: mol_type = other DNA
tggtgcaccggtttcccgggacaaccctgctggaagaagcgc

SEQ ID NO: 5065 - DNA, 36 bp, Thermothielavioides terrestris
  source 1..36: mol_type = other DNA
tggtgcaccttcttcctggggcagccgtgctggaag

SEQ ID NO: 5066 - DNA, 39 bp, Thermothielavioides terrestris
  source 1..39: mol_type = other DNA
tggtgcaccttcttcctggggcagccgtgctggaagcgc

SEQ ID NO: 5067 - DNA, 36 bp, Colletotrichum asianum
  source 1..36: mol_type = other DNA
tggtgcacgaagcctgggcagccgtgctggaagagg

SEQ ID NO: 5068 - DNA, 36 bp, Colletotrichum fructicola; identical to SEQ ID NO: 5067
  source 1..36: mol_type = other DNA

SEQ ID NO: 5069 - DNA, 36 bp, Colletotrichum fructicola; identical to SEQ ID NO: 5067
  source 1..36: mol_type = other DNA

SEQ ID NO: 5070 - DNA, 36 bp, Colletotrichum fructicola; identical to SEQ ID NO: 5067
  source 1..36: mol_type = other DNA

SEQ ID NO: 5071 - DNA, 36 bp, Colletotrichum fructicola; identical to SEQ ID NO: 5067
  source 1..36: mol_type = other DNA

SEQ ID NO: 5072 - DNA, 36 bp, Colletotrichum siamense; identical to SEQ ID NO: 5067
  source 1..36: mol_type = other DNA

SEQ ID NO: 5073 - DNA, 33 bp, Phaeoacremonium minimum; identical to SEQ ID NO: 4757
  source 1..33: mol_type = other DNA

SEQ ID NO: 5074 - DNA, 36 bp, Phaeoacremonium minimum
  source 1..36: mol_type = other DNA
tggtgcactaagcacggccagtcatgctggaagcgg

SEQ ID NO: 5075 - DNA, 33 bp, Drechmeria coniospora
  source 1..33: mol_type = other DNA
tggtgcactcgtcccggcagcggctgctggaag

SEQ ID NO: 5076 - DNA, 42 bp, Drechmeria coniospora
  source 1..42: mol_type = other DNA
tggtgcactcgtcccggcagcggctgctggaaggtgaagcgg

SEQ ID NO: 5077 - DNA, 42 bp, Stachybotrys chartarum
  source 1..42: mol_type = other DNA
tggtgcactcgtcccgggcagccgtgctggaaagcgaagcgc

SEQ ID NO: 5078 - DNA, 36 bp, Madurella mycetomatis
  source 1..36: mol_type = other DNA
tggtgcactggcttccccggccagccttgctggaag

SEQ ID NO: 5079 - DNA, 45 bp, Madurella mycetomatis
  source 1..45: mol_type = other DNA
tggtgcactggcttccctggccagccgtgttggaagttgaagcgc

SEQ ID NO: 5080 - DNA, 36 bp, Beauveria bassiana
  source 1..36: mol_type = other DNA
tggtgcatgagacccggtcagccgtgctggaagcgc

SEQ ID NO: 5081 - DNA, 36 bp, Beauveria bassiana; identical to SEQ ID NO: 5080
  source 1..36: mol_type = other DNA

SEQ ID NO: 5082 - DNA, 36 bp, Beauveria bassiana; identical to SEQ ID NO: 5080
  source 1..36: mol_type = other DNA

SEQ ID NO: 5083 - DNA, 36 bp, Beauveria bassiana; identical to SEQ ID NO: 5080
  source 1..36: mol_type = other DNA

SEQ ID NO: 5084 - DNA, 42 bp, Aspergillus fumigatiaffinis; identical to SEQ ID NO: 3441
  source 1..42: mol_type = other DNA

SEQ ID NO: 5085 - DNA, 42 bp, Aspergillus fumigatiaffinis; identical to SEQ ID NO: 3441
  source 1..42: mol_type = other DNA

SEQ ID NO: 5086 - DNA, 33 bp, Phialemoniopsis curvata
  source 1..33: mol_type = other DNA
tggtgcccgatccggggccagccgtgctggaag

SEQ ID NO: 5087 - DNA, 33 bp, Pyricularia oryzae
  source 1..33: mol_type = other DNA
tggtgcccgcgccgaggccagccttgctggaag

SEQ ID NO: 5088 - DNA, 33 bp, Pyricularia oryzae; identical to SEQ ID NO: 5087
  source 1..33: mol_type = other DNA

SEQ ID NO: 5089 - DNA, 33 bp, Pyricularia oryzae; identical to SEQ ID NO: 5087
  source 1..33: mol_type = other DNA

SEQ ID NO: 5090 - DNA, 36 bp, Pyricularia oryzae
  source 1..36: mol_type = other DNA
tggtgcccgcgccgaggccagccttgctggaagcgc

SEQ ID NO: 5091 - DNA, 36 bp, Pyricularia oryzae; identical to SEQ ID NO: 5090
  source 1..36: mol_type = other DNA

SEQ ID NO: 5092 - DNA, 36 bp, Pyricularia oryzae; identical to SEQ ID NO: 5090
  source 1..36: mol_type = other DNA

SEQ ID NO: 5093 - DNA, 33 bp, Pyricularia pennisetigena
  source 1..33: mol_type = other DNA
tggtgccctcgccgcggccagccctgctggaag

SEQ ID NO: 5094 - DNA, 36 bp, Pyricularia pennisetigena
  source 1..36: mol_type = other DNA
tggtgccctcgccgcggccagccctgctggaagcgc

SEQ ID NO: 5095 - DNA, 42 bp, Neurospora tetrasperma; identical to SEQ ID NO: 4792
  source 1..42: mol_type = other DNA

SEQ ID NO: 5096 - DNA, 36 bp, Neurospora tetrasperma
  source 1..36: mol_type = other DNA
tggtgccgcattcacggtcagtcctgctggaagcgt

SEQ ID NO: 5097 - DNA, 33 bp, Neurospora tetrasperma; identical to SEQ ID NO: 4794
  source 1..33: mol_type = other DNA

SEQ ID NO: 5098 - DNA, 33 bp, Neurospora tetrasperma
  source 1..33: mol_type = other DNA
tggtgccggatccacggccagtcgtgctggaag

SEQ ID NO: 5099 - DNA, 33 bp, Neurospora tetrasperma; identical to SEQ ID NO: 4797
  source 1..33: mol_type = other DNA

SEQ ID NO: 5100 - DNA, 33 bp, Neurospora tetrasperma; identical to SEQ ID NO: 4797
  source 1..33: mol_type = other DNA

SEQ ID NO: 5101 - DNA, 33 bp, Sordaria macrospora
  source 1..33: mol_type = other DNA
tggtgccggatccatggccagtcttgctggaag

SEQ ID NO: 5102 - DNA, 33 bp, Sordaria macrospora; identical to SEQ ID NO: 5101
  source 1..33: mol_type = other DNA

SEQ ID NO: 5103 - DNA, 33 bp, Sordaria macrospora; identical to SEQ ID NO: 5101
  source 1..33: mol_type = other DNA

SEQ ID NO: 5104 - DNA, 33 bp, Sordaria macrospora; identical to SEQ ID NO: 5101
  source 1..33: mol_type = other DNA

SEQ ID NO: 5105 - DNA, 36 bp, Cytospora leucostoma
  source 1..36: mol_type = other DNA
tggtgcctcctgaagggccagggctgctggaagcgc

SEQ ID NO: 5106 - DNA, 33 bp, Valsa sordida
  source 1..33: mol_type = other DNA
tggtgcctgctcaagggccagggctgctggaag

SEQ ID NO: 5107 - DNA, 36 bp, Valsa sordida
  source 1..36: mol_type = other DNA
tggtgcctgctcaagggccagggctgctggaagcgt

SEQ ID NO: 5108 - DNA, 36 bp, Valsa malicola; identical to SEQ ID NO: 5107
  source 1..36: mol_type = other DNA

SEQ ID NO: 5109 - DNA, 33 bp, Valsa mali
  source 1..33: mol_type = other DNA
tggtgcctgttcaagggcgagggctgctggaaa

SEQ ID NO: 5110 - DNA, 42 bp, Valsa mali
  source 1..42: mol_type = other DNA
tggtgcctgttcaagggcgagggctgctggaaagtcaagcgt

SEQ ID NO: 5111 - DNA, 33 bp, Coniella lustricola; identical to SEQ ID NO: 4815
  source 1..33: mol_type = other DNA

SEQ ID NO: 5112 - DNA, 36 bp, Coniella lustricola
  source 1..36: mol_type = other DNA
tggtgcctgttccacggcgagggctgctggaagcgt

SEQ ID NO: 5113 - DNA, 33 bp, Coniella lustricola
  source 1..33: mol_type = other DNA
tggtgcctgtttcacggcgagggctgctggaag

SEQ ID NO: 5114 - DNA, 33 bp, Botrytis elliptica
  source 1..33: mol_type = other DNA
tggtgcggacgcccaggacagccatgtaagcgc

SEQ ID NO: 5115 - DNA, 30 bp, Botryotinia convoluta
  source 1..30: mol_type = other DNA
tggtgcggacgccccggacaaccatgtaaa

SEQ ID NO: 5116 - DNA, 33 bp, Botryotinia convoluta
  source 1..33: mol_type = other DNA
tggtgcggacgccccggacaaccatgtaaacgt

SEQ ID NO: 5117 - DNA, 30 bp, Sclerotinia sclerotiorum
  source 1..30: mol_type = other DNA
tggtgcggacgccccggccaaccatgcaaa

SEQ ID NO: 5118 - DNA, 39 bp, Sclerotinia sclerotiorum
  source 1..39: mol_type = other DNA
tggtgcggacgccccggccaaccatgcaaagagaagcgc

SEQ ID NO: 5119 - DNA, 33 bp, Monilinia laxa
  source 1..33: mol_type = other DNA
tggtgcggacgccccggccaaggctgcaaacgt

SEQ ID NO: 5120 - DNA, 27 bp, Botrytis hyacinthi
  source 1..27: mol_type = other DNA
tggtgcggacgccccggtcaaccatgc

SEQ ID NO: 5121 - DNA, 30 bp, Botrytis hyacinthi; identical to SEQ ID NO: 939
  source 1..30: mol_type = other DNA

SEQ ID NO: 5122 - DNA, 33 bp, Botrytis hyacinthi; identical to SEQ ID NO: 4832
  source 1..33: mol_type = other DNA

SEQ ID NO: 5123 - DNA, 33 bp, Botrytis paeoniae; identical to SEQ ID NO: 4832
  source 1..33: mol_type = other DNA

SEQ ID NO: 5124 - DNA, 39 bp, Botrytis paeoniae
  source 1..39: mol_type = other DNA
tggtgcggacgccccggtcaaccatgcaaggagaagcgt

SEQ ID NO: 5125 - DNA, 33 bp, Sclerotinia borealis
  source 1..33: mol_type = other DNA
tggtgcggacgccctggtcaaccatgcaagcgt

SEQ ID NO: 5126 - DNA, 30 bp, Botryotinia calthae
  source 1..30: mol_type = other DNA
tggtgcggacgtcccggacaaccatgcaag

SEQ ID NO: 5127 - DNA, 33 bp, Botryotinia calthae
  source 1..33: mol_type = other DNA
tggtgcggacgtcccggacaaccatgcaagcgt

SEQ ID NO: 5128 - DNA, 33 bp, Botryotinia calthae; identical to SEQ ID NO: 5127
  source 1..33: mol_type = other DNA

SEQ ID NO: 5129 - DNA, 30 bp, Sclerotinia borealis
  source 1..30: mol_type = other DNA
tggtgcggacgtcccggacaaccctgcaag

SEQ ID NO: 5130 - DNA, 30 bp, Rutstroemia sp.; identical to SEQ ID NO: 747
  source 1..30: mol_type = other DNA; note = NJR-2017a BVV2

SEQ ID NO: 5131 - DNA, 33 bp, Rutstroemia sp.
  source 1..33: mol_type = other DNA; note = NJR-2017a BVV2
tggtgcggccgccccggccaaccctgcaaacgc

SEQ ID NO: 5132 - DNA, 30 bp, Rutstroemia sp.
  source 1..30: mol_type = other DNA; note = NJR-2017a BBW
tggtgcggccgccccgggcaaccctgcaaa

SEQ ID NO: 5133 - DNA, 30 bp, Rutstroemia sp.
  source 1..30: mol_type = other DNA; note = NJR-2017a BBW
tggtgcggccgccccggtcaaccctgcaaa

SEQ ID NO: 5134 - DNA, 33 bp, Zymoseptoria brevis
  source 1..33: mol_type = other DNA
tggtgcggtgccatcggtgccccatgcgccaaa

SEQ ID NO: 5135 - DNA, 42 bp, Trichoderma longibrachiatum
  source 1..42: mol_type = other DNA
tggtgctaccgcatcggcgagccttgctggaaggctaagcgc

SEQ ID NO: 5136 - DNA, 42 bp, Trichoderma gamsii
  source 1..42: mol_type = other DNA
tggtgctggcgcgtcggcgagtcttgttggaaggccaagcgc

SEQ ID NO: 5137 - DNA, 32 bp, Diaporthe ampelina; identical to SEQ ID NO: 4859
  source 1..32: mol_type = other DNA

SEQ ID NO: 5138 - DNA, 33 bp, Diaporthe ampelina
  source 1..33: mol_type = other DNA
tggtgcttctggaagggccagggctgctggaag

SEQ ID NO: 5139 - DNA, 39 bp, Chaetomium thermophilum
  source 1..39: mol_type = other DNA
tggtgtacccgcttccccggccagccatgttggaaacgt

SEQ ID NO: 5140 - DNA, 18 bp, Purpureocillium lilacinum
  source 1..18: mol_type = other DNA
tggtgtacgcgacgcggg

SEQ ID NO: 5141 - DNA, 33 bp, Sordaria macrospora
  source 1..33: mol_type = other DNA
tggtgtcggatccatggccagtcctgctggaag

SEQ ID NO: 5142 - DNA, 33 bp, Sordaria macrospora; identical to SEQ ID NO: 5141
  source 1..33: mol_type = other DNA

SEQ ID NO: 5143 - DNA, 33 bp, Sordaria macrospora; identical to SEQ ID NO: 5141
  source 1..33: mol_type = other DNA

SEQ ID NO: 5144 - DNA, 33 bp, Sordaria macrospora; identical to SEQ ID NO: 5141
  source 1..33: mol_type = other DNA

SEQ ID NO: 5145 - DNA, 33 bp, Sordaria macrospora; identical to SEQ ID NO: 5141
  source 1..33: mol_type = other DNA

SEQ ID NO: 5146 - DNA, 33 bp, Sordaria macrospora; identical to SEQ ID NO: 5141
  source 1..33: mol_type = other DNA

SEQ ID NO: 5147 - DNA, 33 bp, Botrytis porri
  source 1..33: mol_type = other DNA
tggtgtggacgtcccggacaaccatgtaaacgt

SEQ ID NO: 5148 - DNA, 42 bp, Coniochaeta sp.
  source 1..42: mol_type = other DNA; note = 2T2.1
tggtgttccgttaaaggagagccgtgctggaagtccaagcgt

SEQ ID NO: 5149 - DNA, 33 bp, Pochonia chlamydosporia; identical to SEQ ID NO: 4864
  source 1..33: mol_type = other DNA

SEQ ID NO: 5150 - DNA, 42 bp, Pochonia chlamydosporia; identical to SEQ ID NO: 4865
  source 1..42: mol_type = other DNA

SEQ ID NO: 5151 - DNA, 39 bp, Hyaloscypha bicolor
  source 1..39: mol_type = other DNA; strain = E
tgtggagctcgagggcagccttgcggtaaagcaaagcgc

SEQ ID NO: 5152 - DNA, 39 bp, Drepanopeziza brunnea
  source 1..39: mol_type = other DNA
tgtggctaccgcggacagccatgccccaaggccaagcgt

SEQ ID NO: 5153 - DNA, 27 bp, Chlorociboria aeruginascens
  source 1..27: mol_type = other DNA
tgtggtcgacccggtcaaggttgcaag

SEQ ID NO: 5154 - DNA, 39 bp, Chalara longipes
  source 1..39: mol_type = other DNA
tgtggtgcacgtggacagccttgcggcaaggccaagcgc

SEQ ID NO: 5155 - DNA, 18 bp, Pseudogymnoascus sp.
  source 1..18: mol_type = other DNA; note = 03VT05
tgttggcgacctggacaa

SEQ ID NO: 5156 - DNA, 39 bp, Pseudogymnoascus sp.
  source 1..39: mol_type = other DNA; note = 05NY08
tgttggcgccctggccagccatgcggcaaagccaagcgc

SEQ ID NO: 5157 - DNA, 39 bp, Pseudogymnoascus sp.
  source 1..39: mol_type = other DNA; note = WSF 3629
tgttggcgtccaggccagccatgtggcaaagccaagcgc

SEQ ID NO: 5158 - DNA, 36 bp, Diplodia corticola
  source 1..36: mol_type = other DNA
ttctgtggtcgtatcagggggcagccctgccacaag

SEQ ID NO: 5159 - DNA, 42 bp, Diplodia corticola
  source 1..42: mol_type = other DNA
ttctgtggtcgtatcagggggcagccctgccacaagaagcgt

SEQ ID NO: 5160 - DNA, 18 bp, Glarea lozoyensis
  source 1..18: mol_type = other DNA
ttgtccatggcgctggca

SEQ ID NO: 5161 - DNA, 33 bp, Monilinia fructicola
  source 1..33: mol_type = other DNA
tttgcgacatccttgtccgggacgtccacacca

SEQ ID NO: 5162 - DNA, 33 bp, Zymoseptoria tritici
  source 1..33: mol_type = other DNA
tttggcacaaggggcgccgatggcaccgcacca

SEQ ID NO: 5163 - DNA, 33 bp, Zymoseptoria tritici; identical to SEQ ID NO: 5162
  source 1..33: mol_type = other DNA

SEQ ID NO: 5164 - DNA, 33 bp, Zymoseptoria tritici; identical to SEQ ID NO: 5162
  source 1..33: mol_type = other DNA

SEQ ID NO: 5165 - DNA, 33 bp, Zymoseptoria tritici; identical to SEQ ID NO: 5162
  source 1..33: mol_type = other DNA

SEQ ID NO: 5166 - DNA, 33 bp, Botrytis fragariae; identical to SEQ ID NO: 3626
  source 1..33: mol_type = other DNA

SEQ ID NO: 5167 - DNA, 33 bp, Botrytis fragariae; identical to SEQ ID NO: 3626
  source 1..33: mol_type = other DNA

SEQ ID NO: 5168 - DNA, 33 bp, Botrytis tulipae; identical to SEQ ID NO: 4517
  source 1..33: mol_type = other DNA

SEQ ID NO: 5169 - DNA, 33 bp, Botrytis cinerea; identical to SEQ ID NO: 4518
  source 1..33: mol_type = other DNA

SEQ ID NO: 5170 - DNA, 33 bp, Botrytis cinerea; identical to SEQ ID NO: 4518
  source 1..33: mol_type = other DNA

SEQ ID NO: 5171 - DNA, 33 bp, Botrytis cinerea; identical to SEQ ID NO: 4518
  source 1..33: mol_type = other DNA

SEQ ID NO: 5172 - DNA, 33 bp, Botrytis galanthina
  source 1..33: mol_type = other DNA
acgtttgcaaggttgtcctgggcgtccacacca

SEQ ID NO: 5173 - DNA, 33 bp, Monilinia fructigena
  source 1..33: mol_type = other DNA
acgtttgcagccttgaccggggcgtccgcacca

SEQ ID NO: 5174 - DNA, 39 bp, Botrytis cinerea
  source 1..39: mol_type = other DNA
agcctcgcgtttacatggttgcccggggcgtccgcacca

SEQ ID NO: 5175 - DNA, 39 bp, Botrytis cinerea; identical to SEQ ID NO: 5174
  source 1..39: mol_type = other DNA

SEQ ID NO: 5176 - DNA, 39 bp, Botrytis cinerea; identical to SEQ ID NO: 5174
  source 1..39: mol_type = other DNA

SEQ ID NO: 5177 - DNA, 36 bp, Botrytis cinerea
  source 1..36: mol_type = other DNA
agtacgtttacatggttgtccggggcgtccacacca

SEQ ID NO: 5178 - DNA, 36 bp, Botrytis cinerea; identical to SEQ ID NO: 5177
  source 1..36: mol_type = other DNA

SEQ ID NO: 5179 - DNA, 36 bp, Botrytis cinerea; identical to SEQ ID NO: 5177
  source 1..36: mol_type = other DNA

SEQ ID NO: 5180 - DNA, 36 bp, Botrytis fragariae
  source 1..36: mol_type = other DNA
agtacgtttgcatggttgtccgggacgtccgcacca

SEQ ID NO: 5181 - DNA, 42 bp, Pseudogymnoascus sp.
  source 1..42: mol_type = other DNA; note = VKM F-3557
atttgctggcgccccggtcagccttgtggcaaggccaagcgt

SEQ ID NO: 5182 - DNA, 42 bp, Pseudogymnoascus sp.; identical to SEQ ID NO: 5181
  source 1..42: mol_type = other DNA; note = VKM F-4516 (FW-969)

SEQ ID NO: 5183 - DNA, 42 bp, Ophiocordyceps camponoti-floridani; identical to SEQ ID NO: 4935
  source 1..42: mol_type = other DNA

SEQ ID NO: 5184 - DNA, 42 bp, Ophiocordyceps camponoti-floridani
  source 1..42: mol_type = other DNA
cctcttgaccttggagcagatggagttggggcgcgtgcacca

SEQ ID NO: 5185 - DNA, 42 bp, Ophiocordyceps camponoti-floridani; identical to SEQ ID NO: 5184
  source 1..42: mol_type = other DNA

SEQ ID NO: 5186 - DNA, 42 bp, Ophiocordyceps camponoti-floridani; identical to SEQ ID NO: 5184
  source 1..42: mol_type = other DNA

SEQ ID NO: 5187 - DNA, 42 bp, Ophiocordyceps camponoti-rufipedis
  source 1..42: mol_type = other DNA
cctcttgactttggagcagatggagttggggcgtttgcacca

SEQ ID NO: 5188 - DNA, 36 bp, Dothistroma septosporum
  source 1..36: mol_type = other DNA
cgatgcactgtccctggtcttgcttgtgggaagcgg

SEQ ID NO: 5189 - DNA, 39 bp, Metarhizium anisopliae
  source 1..39: mol_type = other DNA
ctccgcgactcggcaaggctgcccagcacgagcgcaaag

SEQ ID NO: 5190 - DNA, 30 bp, Botrytis fragariae; identical to SEQ ID NO: 4946
  source 1..30: mol_type = other DNA

SEQ ID NO: 5191 - DNA, 30 bp, Botrytis galanthina; identical to SEQ ID NO: 4952
  source 1..30: mol_type = other DNA

SEQ ID NO: 5192 - DNA, 30 bp, Botrytis tulipae; identical to SEQ ID NO: 4952
  source 1..30: mol_type = other DNA

SEQ ID NO: 5193 - DNA, 30 bp, Lindgomyces ingoldianus
  source 1..30: mol_type = other DNA
cttagagcagggctggccgacgagcctgca

SEQ ID NO: 5194 - DNA, 33 bp, Lindgomyces ingoldianus
  source 1..33: mol_type = other DNA
cttagagcagggctggccgacgagcctgcatcg

SEQ ID NO: 5195 - DNA, 33 bp, Pyricularia grisea
  source 1..33: mol_type = other DNA
cttccagcacggctggcctcggcgcgggcacca

SEQ ID NO: 5196 - DNA, 33 bp, Cryphonectria parasitica
  source 1..33: mol_type = other DNA
cttccagcagccctcaccgtggaagagacacca

SEQ ID NO: 5197 - DNA, 33 bp, Diaporthe helianthi
  source 1..33: mol_type = other DNA
cttccagcagccctcgcccttccagaaacacca

SEQ ID NO: 5198 - DNA, 33 bp, Diaporthe helianthi
  source 1..33: mol_type = other DNA
cttccagcagccctcgcccttccagaagcacca

SEQ ID NO: 5199 - DNA, 33 bp, Valsa mali
  source 1..33: mol_type = other DNA
cttccagcagccctcgcccttgaagaggcacca

SEQ ID NO: 5200 - DNA, 33 bp, Cryphonectria parasitica; identical to SEQ ID NO: 4960
  source 1..33: mol_type = other DNA

SEQ ID NO: 5201 - DNA, 33 bp, Cryphonectria parasitica
  source 1..33: mol_type = other DNA
cttccagcagccctcgccgtggaagaggcacca

SEQ ID NO: 5202 - DNA, 33 bp, Neurospora crassa; identical to SEQ ID NO: 4963
  source 1..33: mol_type = other DNA

SEQ ID NO: 5203 - DNA, 33 bp, Neurospora crassa; identical to SEQ ID NO: 4963
  source 1..33: mol_type = other DNA

SEQ ID NO: 5204 - DNA, 33 bp, Pyricularia sp.
  source 1..33: mol_type = other DNA; note = CBS 133598
cttccagcagggttggccacggcgcgggcacca

SEQ ID NO: 5205 - DNA, 30 bp, Botrytis fragariae
  source 1..30: mol_type = other DNA
cttgcatggctgtccgggacggccacacca

SEQ ID NO: 5206 - DNA, 30 bp, Botrytis cinerea
  source 1..30: mol_type = other DNA
cttgcatggctgtccgggacgtccacacca

SEQ ID NO: 5207 - DNA, 30 bp, Botrytis cinerea; identical to SEQ ID NO: 5206
  source 1..30: mol_type = other DNA

SEQ ID NO: 5208 - DNA, 30 bp, Botrytis cinerea; identical to SEQ ID NO: 5206
  source 1..30: mol_type = other DNA

SEQ ID NO: 5209 - DNA, 30 bp, Botryotinia narcissicola; identical to SEQ ID NO: 4972
  source 1..30: mol_type = other DNA

SEQ ID NO: 5210 - DNA, 30 bp, Lindgomyces ingoldianus
  source 1..30: mol_type = other DNA
cttggagcatggctgaccaacgagacggca

SEQ ID NO: 5211 - DNA, 36 bp, Lasiodiplodia theobromae
  source 1..36: mol_type = other DNA
cttgtggcagggctgaccgcggatacggccacagaa

SEQ ID NO: 5212 - DNA, 36 bp, Lasiodiplodia theobromae; identical to SEQ ID NO: 5211
  source 1..36: mol_type = other DNA

SEQ ID NO: 5213 - DNA, 36 bp, Lasiodiplodia theobromae
  source 1..36: mol_type = other DNA
cttgtggcagggctggccgcggatacgaccgcaaaa

SEQ ID NO: 5214 - DNA, 36 bp, Lasiodiplodia theobromae; identical to SEQ ID NO: 5213
  source 1..36: mol_type = other DNA

SEQ ID NO: 5215 - DNA, 27 bp, Ophiocordyceps camponoti-floridani
  source 1..27: mol_type = other DNA
gcagatggagttggggcgcttgcacca

SEQ ID NO: 5216 - DNA, 27 bp, Metarhizium anisopliae
  source 1..27: mol_type = other DNA
gcagctctggccatgcctccagcacca

SEQ ID NO: 5217 - DNA, 27 bp, Metarhizium anisopliae
  source 1..27: mol_type = other DNA
gcagctctggccatgcctccagcacca

SEQ ID NO: 5218 - DNA, 33 bp, Botryotinia narcissicola
  source 1..33: mol_type = other DNA
gcgcttacatggttgtcctgggcgtccgcacca

SEQ ID NO: 5219 - DNA, 36 bp, Colletotrichum gloeosporioides; identical to SEQ ID NO: 4605
  source 1..36: mol_type = other DNA

SEQ ID NO: 5220 - DNA, 36 bp, Pyricularia grisea
  source 1..36: mol_type = other DNA
gcgcttccagcacggctggccgcggcgagggcacca

SEQ ID NO: 5221 - DNA, 36 bp, Colletotrichum siamense; identical to SEQ ID NO: 4986
  source 1..36: mol_type = other DNA

SEQ ID NO: 5222 - DNA, 36 bp, Valsa mali
  source 1..36: mol_type = other DNA
gcgcttccagcagccctcgcccttgaagaggcacca

SEQ ID NO: 5223 - DNA, 36 bp, Pyricularia oryzae
  source 1..36: mol_type = other DNA
gcgcttccagcagggctggccgcggcgggggcacca

SEQ ID NO: 5224 - DNA, 36 bp, Colletotrichum siamense
  source 1..36: mol_type = other DNA
gcgcttccagcagggctggccgggcttggtacacca

SEQ ID NO: 5225 - DNA, 36 bp, Colletotrichum siamense; identical to SEQ ID NO: 5224
  source 1..36: mol_type = other DNA

SEQ ID NO: 5226 - DNA, 36 bp, Pyricularia sp.
  source 1..36: mol_type = other DNA; note = CBS 133598
gcgcttccagcagggttggccacggcgcgggcacca

SEQ ID NO: 5227 - DNA, 36 bp, Colletotrichum fructicola
  source 1..36: mol_type = other DNA
gcgcttccagcatggctggccgggcttggtgcacca

SEQ ID NO: 5228 - DNA, 36 bp, Colletotrichum fructicola; identical to SEQ ID NO: 5227
  source 1..36: mol_type = other DNA

SEQ ID NO: 5229 - DNA, 36 bp, Colletotrichum fructicola; identical to SEQ ID NO: 5227
  source 1..36: mol_type = other DNA

SEQ ID NO: 5230 - DNA, 39 bp, Sclerotinia sclerotiorum
  source 1..39: mol_type = other DNA
gcgcttctctttgcatggttggccggggcgtccgcacca

SEQ ID NO: 5231 - DNA, 42 bp, Pyricularia oryzae
  source 1..42: mol_type = other DNA
gcgcttgaccttccagcagggctggccgcgccgggggcacca

SEQ ID NO: 5232 - DNA, 33 bp, Monilinia fructicola
  source 1..33: mol_type = other DNA
gcgcttgcagccttggccggggcgtccgcacca

SEQ ID NO: 5233 - DNA, 33 bp, Sclerotinia sclerotiorum
  source 1..33: mol_type = other DNA
gcgcttgcatggttggcctgggcgtccgcacca

SEQ ID NO: 5234 - DNA, 42 bp, Lophiostoma macrostomum
  source 1..42: mol_type = other DNA
gcgcttggccttaccgcagggctgtccgcggtagtggcagaa

SEQ ID NO: 5235 - DNA, 42 bp, Neurospora crassa
  source 1..42: mol_type = other DNA
gcgcttggccttccagcaggactggccgtggatgcggcacca

SEQ ID NO: 5236 - DNA, 42 bp, Neurospora crassa; identical to SEQ ID NO: 5235
  source 1..42: mol_type = other DNA

SEQ ID NO: 5237 - DNA, 42 bp, Neofusicoccum parvum
  source 1..42: mol_type = other DNA
gcgcttggccttggagcacggctgtcccttccagcggcacca

SEQ ID NO: 5238 - DNA, 42 bp, Stachybotrys chlorohalonata
  source 1..42: mol_type = other DNA
gcgcttggctttccagcacggctggccggggcgtgtgcacca

SEQ ID NO: 5239 - DNA, 39 bp, Pseudogymnoascus sp.
  source 1..39: mol_type = other DNA; note = VKM F-4514 (FW-929)
gcgcttggcttttccgcatggctggcctggacgccagca

SEQ ID NO: 5240 - DNA, 42 bp, Pseudogymnoascus sp.
  source 1..42: mol_type = other DNA; note = VKM F-4514 (FW-929)
gcgcttggcttttccgcatggctggcctggacgccagcagat

SEQ ID NO: 5241 - DNA, 39 bp, Lophium mytilinum
  source 1..39: mol_type = other DNA
gcgcttgtctttgctgcaagactggcctgggagatgaca

SEQ ID NO: 5242 - DNA, 39 bp, Lophium mytilinum
  source 1..39: mol_type = other DNA
gcgcttttccttggagcaagattggccggggagatggca

SEQ ID NO: 5243 - DNA, 36 bp, Colletotrichum siamense
  source 1..36: mol_type = other DNA
gcgtttccagcagggctggccgggcttggtgcacca

SEQ ID NO: 5244 - DNA, 33 bp, Rutstroemia sp.
  source 1..33: mol_type = other DNA; note = NJR-2017a WRK4
gcgtttgcagggttggccggggcggccgcacca

SEQ ID NO: 5245 - DNA, 42 bp, Mytilinidion resinicola
  source 1..42: mol_type = other DNA
tactgccatctgcccggccagtcttgcagcaaggacaaacgc

SEQ ID NO: 5246 - DNA, 42 bp, Trichoderma asperellum
  source 1..42: mol_type = other DNA
tcgcttagccttccagcaagactcgccgacgcgccagcacca

SEQ ID NO: 5247 - DNA, 42 bp, Trichoderma asperellum
  source 1..42: mol_type = other DNA
tcgcttggccttccagcaagactcgccgacgcgccagcacca

SEQ ID NO: 5248 - DNA, 42 bp, Trichoderma gamsii
  source 1..42: mol_type = other DNA
tcgcttggccttccagcaagactcgccgactctccagcacca

SEQ ID NO: 5249 - DNA, 42 bp, Trichoderma atroviride
  source 1..42: mol_type = other DNA
tcgcttggccttccagcacgactcgccgactctccagcacca

SEQ ID NO: 5250 - DNA, 42 bp, Metarhizium anisopliae
  source 1..42: mol_type = other DNA
tcgtcgatcatgaacacatggcagacctgagctggcgaccca

SEQ ID NO: 5251 - DNA, 33 bp, Venustampulla echinocandica
  source 1..33: mol_type = other DNA
tctcttccagcagccttgtccaacgtgggtgca

SEQ ID NO: 5252 - DNA, 30 bp, Sodiomyces alkalinus
  source 1..30: mol_type = other DNA
tgcaccaagcccggtcaaccgtgctggaag

SEQ ID NO: 5253 - DNA, 30 bp, Sodiomyces alkalinus
  source 1..30: mol_type = other DNA
tgcaccaagcctggccagccatgctggaag

SEQ ID NO: 5254 - DNA, 33 bp, Dothistroma septosporum
  source 1..33: mol_type = other DNA
tgcaccgtccctggtcttgcttgcggcaagcgg

SEQ ID NO: 5255 - DNA, 39 bp, Mytilinidion resinicola
  source 1..39: mol_type = other DNA
tgccatctccccggccagtcttgcagcaaggacaaacgc

SEQ ID NO: 5256 - DNA, 39 bp, Diplocarpon rosae
  source 1..39: mol_type = other DNA
tgcggacaccccggtcagccatgtggaaaggccaagcgt

SEQ ID NO: 5257 - DNA, 39 bp, Diplocarpon rosae; identical to SEQ ID NO: 5256
  source 1..39: mol_type = other DNA

SEQ ID NO: 5258 - DNA, 39 bp, Pseudogymnoascus sp.
  source 1..39: mol_type = other DNA; note = VKM F-3557
tgctggcgtcccggtcagccatgcggtaaagccaagcgt

SEQ ID NO: 5259 - DNA, 39 bp, Pseudogymnoascus sp.; identical to SEQ ID NO: 5258
  source 1..39: mol_type = other DNA; note = VKM F-4516 (FW-969)

SEQ ID NO: 5260 - DNA, 27 bp, Aspergillus fumigatiaffinis
  source 1..27: mol_type = other DNA
tggacacatgcgagtgggcaaggatcg

SEQ ID NO: 5261 - DNA, 36 bp, Aspergillus fumigatiaffinis; identical to SEQ ID NO: 5054
  source 1..36: mol_type = other DNA

SEQ ID NO: 5262 - DNA, 39 bp, Aspergillus lentulus
  source 1..39: mol_type = other DNA
tggcaacatctcttccagaaagggtgtcaacctgcccgg

SEQ ID NO: 5263 - DNA, 39 bp, Aspergillus lentulus; identical to SEQ ID NO: 5262
  source 1..39: mol_type = other DNA

SEQ ID NO: 5264 - DNA, 33 bp, Purpureocillium lilacinum
  source 1..33: mol_type = other DNA
tggtgcaaccgtcccggacagccctgcaagagg

SEQ ID NO: 5265 - DNA, 33 bp, Purpureocillium lilacinum; identical to SEQ ID NO: 5264
  source 1..33: mol_type = other DNA

SEQ ID NO: 5266 - DNA, 33 bp, Purpureocillium lilacinum
  source 1..33: mol_type = other DNA
tggtgcaaccgtcccggacagccgtgcaagagg

SEQ ID NO: 5267 - DNA, 36 bp, Colletotrichum tropicale; identical to SEQ ID NO: 4749
  source 1..36: mol_type = other DNA

SEQ ID NO: 5268 - DNA, 36 bp, Colletotrichum aenigma; identical to SEQ ID NO: 4749
  source 1..36: mol_type = other DNA

SEQ ID NO: 5269 - DNA, 36 bp, Colletotrichum fructicola
  source 1..36: mol_type = other DNA
tggtgcactaagcccggacagccatgctggaagcgt

SEQ ID NO: 5270 - DNA, 36 bp, Colletotrichum fructicola; identical to SEQ ID NO: 5269
  source 1..36: mol_type = other DNA

SEQ ID NO: 5271 - DNA, 36 bp, Colletotrichum fructicola; identical to SEQ ID NO: 5269
  source 1..36: mol_type = other DNA

SEQ ID NO: 5272 - DNA, 36 bp, Colletotrichum fructicola; identical to SEQ ID NO: 5269
  source 1..36: mol_type = other DNA

SEQ ID NO: 5273 - DNA, 36 bp, Colletotrichum siamense
  source 1..36: mol_type = other DNA
tggtgcactaagcccggccagccctgctggaagcgc

SEQ ID NO: 5274 - DNA, 36 bp, Madurella mycetomatis
  source 1..36: mol_type = other DNA
tggtgcactggcttccctggccagccgtgttggaag

SEQ ID NO: 5275 - DNA, 36 bp, Madurella mycetomatis; identical to SEQ ID NO: 5274
  source 1..36: mol_type = other DNA

SEQ ID NO: 5276 - DNA, 33 bp, Pyricularia oryzae
  source 1..33: mol_type = other DNA
tggtgcccgcgtcgcggccagccctgctggaag

SEQ ID NO: 5277 - DNA, 33 bp, Pyricularia oryzae; identical to SEQ ID NO: 5276
  source 1..33: mol_type = other DNA

SEQ ID NO: 5278 - DNA, 33 bp, Pyricularia oryzae; identical to SEQ ID NO: 5276
  source 1..33: mol_type = other DNA

SEQ ID NO: 5279 - DNA, 36 bp, Pyricularia oryzae
  source 1..36: mol_type = other DNA
tggtgcccgcgtcgcggccagccctgctggaagcgg

SEQ ID NO: 5280 - DNA, 36 bp, Pyricularia oryzae; identical to SEQ ID NO: 5279
  source 1..36: mol_type = other DNA

SEQ ID NO: 5281 - DNA, 36 bp, Pyricularia oryzae; identical to SEQ ID NO: 5279
  source 1..36: mol_type = other DNA

SEQ ID NO: 5282 - DNA, 33 bp, Neurospora tetrasperma
  source 1..33: mol_type = other DNA
tggtgccgcatccacggccagtcgtgctggaag

SEQ ID NO: 5283 - DNA, 33 bp, Neurospora tetrasperma; identical to SEQ ID NO: 5098
  source 1..33: mol_type = other DNA

SEQ ID NO: 5284 - DNA, 42 bp, Neurospora tetrasperma
  source 1..42: mol_type = other DNA
tggtgccggatccatggccagtcctgctggaaggtcaagcgt

SEQ ID NO: 5285 - DNA, 36 bp, Cytospora leucostoma
  source 1..36: mol_type = other DNA
tggtgcctgctcaagggccaagggtgctggaagcgc

SEQ ID NO: 5286 - DNA, 33 bp, Valsa sordida
  source 1..33: mol_type = other DNA
tggtgcctgctcaagggccaggggtgctggaag

SEQ ID NO: 5287 - DNA, 36 bp, Valsa sordida
  source 1..36: mol_type = other DNA
tggtgcctgctcaagggccaggggtgctggaagcgg

SEQ ID NO: 5288 - DNA, 33 bp, Valsa mali
  source 1..33: mol_type = other DNA
tggtgcctgttcaagggtgaagggtgctggaag

SEQ ID NO: 5289 - DNA, 36 bp, Valsa mali
  source 1..36: mol_type = other DNA
tggtgcctgttcaagggtgaagggtgctggaagcgt

SEQ ID NO: 5290 - DNA, 33 bp, Coniella lustricola; identical to SEQ ID NO: 5113
  source 1..33: mol_type = other DNA

SEQ ID NO: 5291 - DNA, 36 bp, Coniella lustricola
  source 1..36: mol_type = other DNA
tggtgcctgtttcacggcgagggctgctggaagcgc

SEQ ID NO: 5292 - DNA, 33 bp, Coniella lustricola
  source 1..33: mol_type = other DNA
tggtgccttttccacggcgagggctgctggaag

SEQ ID NO: 5293 - DNA, 33 bp, Botrytis elliptica; identical to SEQ ID NO: 5116
  source 1..33: mol_type = other DNA

SEQ ID NO: 5294 - DNA, 30 bp, Botryotinia convoluta; identical to SEQ ID NO: 939
  source 1..30: mol_type = other DNA

SEQ ID NO: 5295 - DNA, 33 bp, Botryotinia convoluta; identical to SEQ ID NO: 4832
  source 1..33: mol_type = other DNA

SEQ ID NO: 5296 - DNA, 33 bp, Monilinia laxa
  source 1..33: mol_type = other DNA
tggtgcggacgccctggtcaaggatgcaagcgt

SEQ ID NO: 5297 - DNA, 27 bp, Botrytis hyacinthi
  source 1..27: mol_type = other DNA
tggtgcggacgtcccggacaaccatgc

SEQ ID NO: 5298 - DNA, 30 bp, Sclerotinia sclerotiorum; identical to SEQ ID NO: 938
  source 1..30: mol_type = other DNA

SEQ ID NO: 5299 - DNA, 30 bp, Botrytis hyacinthi; identical to SEQ ID NO: 938
  source 1..30: mol_type = other DNA

SEQ ID NO: 5300 - DNA, 30 bp, Botrytis paeoniae; identical to SEQ ID NO: 938
  source 1..30: mol_type = other DNA

SEQ ID NO: 5301 - DNA, 33 bp, Sclerotinia sclerotiorum
  source 1..33: mol_type = other DNA
tggtgcggacgtcccggacaaccatgcaaacgt

SEQ ID NO: 5302 - DNA, 33 bp, Botrytis hyacinthi; identical to SEQ ID NO: 5301
  source 1..33: mol_type = other DNA

SEQ ID NO: 5303 - DNA, 33 bp, Botrytis paeoniae; identical to SEQ ID NO: 5301
  source 1..33: mol_type = other DNA

SEQ ID NO: 5304 - DNA, 33 bp, Sclerotinia borealis
  source 1..33: mol_type = other DNA
tggtgcggacgtcccggacaaccctgcaagcgt

SEQ ID NO: 5305 - DNA, 30 bp, Rutstroemia sp.
  source 1..30: mol_type = other DNA; note = NJR-2017a BVV2
tggtgcggccgccccggccagccttgcaaa

SEQ ID NO: 5306 - DNA, 39 bp, Rutstroemia sp.
  source 1..39: mol_type = other DNA; note = NJR-2017a BVV2
tggtgcggccgccccggccagccttgcaaagagaagcgc

SEQ ID NO: 5307 - DNA, 33 bp, Rutstroemia sp.
  source 1..33: mol_type = other DNA; note = NJR-2017a BBW
tggtgcggccgccccggtcaaccctgcaaacgc

SEQ ID NO: 5308 - DNA, 30 bp, Rutstroemia sp.; identical to SEQ ID NO: 751
  source 1..30: mol_type = other DNA; note = NJR-2017a BBW

SEQ ID NO: 5309 - DNA, 39 bp, Zymoseptoria brevis
  source 1..39: mol_type = other DNA
tggtgcggtgccattggtgcaccttgcgccaagcgcgac

SEQ ID NO: 5310 - DNA, 42 bp, Trichoderma gamsii
  source 1..42: mol_type = other DNA
tggtgctggcgtgtcggcgagtcctgctggaaggccaagcgt

SEQ ID NO: 5311 - DNA, 33 bp, Diaporthe ampelina; identical to SEQ ID NO: 5138
  source 1..33: mol_type = other DNA

SEQ ID NO: 5312 - DNA, 36 bp, Diaporthe ampelina
  source 1..36: mol_type = other DNA
tggtgcttctggaagggccagggctgctggaagcgc

SEQ ID NO: 5313 - DNA, 39 bp, Chaetomium thermophilum
  source 1..39: mol_type = other DNA
tggtgtacccgcttcccgggccagccttgctggaagcgt

SEQ ID NO: 5314 - DNA, 33 bp, Pyricularia pennisetigena
  source 1..33: mol_type = other DNA
tggtgtccgcgccgaggccagccgtgctggaag

SEQ ID NO: 5315 - DNA, 36 bp, Pyricularia pennisetigena
  source 1..36: mol_type = other DNA
tggtgtccgcgccgaggccagccgtgctggaagcgc

SEQ ID NO: 5316 - DNA, 42 bp, Sordaria macrospora
  source 1..42: mol_type = other DNA
tggtgtcggatccatggccagtcctgctggaaggtcaagcgt

SEQ ID NO: 5317 - DNA, 42 bp, Sordaria macrospora; identical to SEQ ID NO: 5316
  source 1..42: mol_type = other DNA

SEQ ID NO: 5318 - DNA, 36 bp, Valsa malicola
  source 1..36: mol_type = other DNA
tggtgtctcctcaagggccagggctgctggaagcgc

SEQ ID NO: 5319 - DNA, 30 bp, Botryotinia calthae
  source 1..30: mol_type = other DNA
tggtgtggacgcccaggacaaccctgcaaa

SEQ ID NO: 5320 - DNA, 33 bp, Botryotinia calthae
  source 1..33: mol_type = other DNA
tggtgtggacgcccaggacaaccctgcaaacgt

SEQ ID NO: 5321 - DNA, 33 bp, Botryotinia calthae
  source 1..33: mol_type = other DNA
tggtgtggacgccccggacaaccatgcaaacgt

SEQ ID NO: 5322 - DNA, 30 bp, Sclerotinia borealis; identical to SEQ ID NO: 451
  source 1..30: mol_type = other DNA

SEQ ID NO: 5323 - DNA, 36 bp, Polyplosphaeria fusca
  source 1..36: mol_type = other DNA
tgtcgcttcccaggctcattctgtggcaagaagaga

SEQ ID NO: 5324 - DNA, 30 bp, Cadophora sp.
  source 1..30: mol_type = other DNA; note = DSE1049
tgtggacaccctggccaaccttgcggaaag

SEQ ID NO: 5325 - DNA, 33 bp, Cadophora sp.
  source 1..33: mol_type = other DNA; note = DSE1049
tgtggacaccctggccaaccttgcggaaagcgt

SEQ ID NO: 5326 - DNA, 39 bp, Hyaloscypha bicolor
  source 1..39: mol_type = other DNA
tgtggagctcgcggacaaccctgtggcaaggccaagcgt

SEQ ID NO: 5327 - DNA, 30 bp, Drepanopeziza brunnea
  source 1..30: mol_type = other DNA
tgtggctaccgcggacagccttgccccaag

SEQ ID NO: 5328 - DNA, 39 bp, Amorphotheca resinae
  source 1..39: mol_type = other DNA
tgtggtaaggttggacagccctgtggcaaggccaagcgt

SEQ ID NO: 5329 - DNA, 39 bp, Chalara longipes
  source 1..39: mol_type = other DNA
tgtggtgcgagaggtcaaccctgtggaaaggctaagcgt

SEQ ID NO: 5330 - DNA, 18 bp, Pseudogymnoascus sp.
  source 1..18: mol_type = other DNA; note = 03VT05
tgttggcgacctggacaa

SEQ ID NO: 5331 - DNA, 39 bp, Pseudogymnoascus sp.
  source 1..39: mol_type = other DNA; note = 03VT05
tgttggcgtccaggccagccgtgcggtaaagccaagcgc

SEQ ID NO: 5332 - DNA, 36 bp, Helotiales sp.
  source 1..36: mol_type = other DNA; note = DMI_Dod_QoI
tttgactttgccgcatggttgacctggataaccgca

SEQ ID NO: 5333 - DNA, 30 bp, Rutstroemia sp.
  source 1..30: mol_type = other DNA; note = NJR-2017a WRK4
tttgcagggttgcccgggacggccgcacca

SEQ ID NO: 5334 - DNA, 33 bp, Zymoseptoria tritici
  source 1..33: mol_type = other DNA
tttggcgcatggggcaccgatggcaccgcacca

SEQ ID NO: 5335 - DNA, 33 bp, Zymoseptoria tritici; identical to SEQ ID NO: 5334
  source 1..33: mol_type = other DNA

SEQ ID NO: 5336 - DNA, 33 bp, Zymoseptoria tritici; identical to SEQ ID NO: 5334
  source 1..33: mol_type = other DNA

SEQ ID NO: 5337 - DNA, 33 bp, Zymoseptoria tritici; identical to SEQ ID NO: 5334
  source 1..33: mol_type = other DNA

SEQ ID NO: 5338 - DNA, 36 bp, Diplodia corticola
  source 1..36: mol_type = other DNA
ttttgtggtcgtatcaggggccagccttgccacaag

SEQ ID NO: 5339 - DNA, 42 bp, Diplodia corticola
  source 1..42: mol_type = other DNA
ttttgtggtcgtatcaggggccagccttgccacaagaagcgc

SEQ ID NO: 5340 - DNA, 30 bp, Botrytis fragariae; identical to SEQ ID NO: 4516
  source 1..30: mol_type = other DNA

SEQ ID NO: 5341 - DNA, 33 bp, Botrytis fragariae
  source 1..33: mol_type = other DNA
acgtttacatggttgcccggggcgtccgcacca

SEQ ID NO: 5342 - DNA, 33 bp, Botrytis tulipae; identical to SEQ ID NO: 5172
  source 1..33: mol_type = other DNA

SEQ ID NO: 5343 - DNA, 33 bp, Botrytis cinerea; identical to SEQ ID NO: 4522
  source 1..33: mol_type = other DNA

SEQ ID NO: 5344 - DNA, 33 bp, Botrytis cinerea; identical to SEQ ID NO: 4522
  source 1..33: mol_type = other DNA

SEQ ID NO: 5345 - DNA, 33 bp, Botrytis cinerea; identical to SEQ ID NO: 4522
  source 1..33: mol_type = other DNA

SEQ ID NO: 5346 - DNA, 33 bp, Botrytis galanthina; identical to SEQ ID NO: 4914
  source 1..33: mol_type = other DNA

SEQ ID NO: 5347 - DNA, 39 bp, Botrytis cinerea
  source 1..39: mol_type = other DNA
agcttcgcgcttgcatggttgaccggggcgtccgcacca

SEQ ID NO: 5348 - DNA, 39 bp, Botrytis cinerea; identical to SEQ ID NO: 5347
  source 1..39: mol_type = other DNA

SEQ ID NO: 5349 - DNA, 39 bp, Botrytis cinerea; identical to SEQ ID NO: 5347
  source 1..39: mol_type = other DNA

SEQ ID NO: 5350 - DNA, 36 bp, Botrytis fragariae
  source 1..36: mol_type = other DNA
atcacgcttacatggttgaccgggacgtccacacca

SEQ ID NO: 5351 - DNA, 42 bp, Ophiocordyceps camponoti-floridani; identical to SEQ ID NO: 5184
  source 1..42: mol_type = other DNA

SEQ ID NO: 5352 - DNA, 42 bp, Ophiocordyceps camponoti-floridani
  source 1..42: mol_type = other DNA
cctcttgaccttggagcagatggagttgggtcgcgtgcacca

SEQ ID NO: 5353 - DNA, 42 bp, Ophiocordyceps camponoti-floridani; identical to SEQ ID NO: 5352
  source 1..42: mol_type = other DNA

SEQ ID NO: 5354 - DNA, 42 bp, Ophiocordyceps camponoti-floridani; identical to SEQ ID NO: 5352
  source 1..42: mol_type = other DNA

SEQ ID NO: 5355 - DNA, 33 bp, Monilinia fructigena; identical to SEQ ID NO: 4939
  source 1..33: mol_type = other DNA

SEQ ID NO: 5356 - DNA, 36 bp, Dothistroma septosporum
  source 1..36: mol_type = other DNA
cgatgcactgttccaggtcttgcatgcggaaagcgt

SEQ ID NO: 5357 - DNA, 33 bp, Diaporthe helianthi; identical to SEQ ID NO: 5198
  source 1..33: mol_type = other DNA

SEQ ID NO: 5358 - DNA, 33 bp, Cryphonectria parasitica
  source 1..33: mol_type = other DNA
cttccagcagccctcgccgtggaagagacacca

SEQ ID NO: 5359 - DNA, 33 bp, Cryphonectria parasitica; identical to SEQ ID NO: 5201
  source 1..33: mol_type = other DNA

SEQ ID NO: 5360 - DNA, 33 bp, Cryphonectria parasitica
  source 1..33: mol_type = other DNA
cttccagcagccttctccgtggaagaggcacca

SEQ ID NO: 5361 - DNA, 33 bp, Valsa mali
  source 1..33: mol_type = other DNA
cttccagcatccctcgcccttgaacaggcacca

SEQ ID NO: 5362 - DNA, 30 bp, Botrytis tulipae
  source 1..30: mol_type = other DNA
cttgcatggctgaccggggcgtccgcacca

SEQ ID NO: 5363 - DNA, 30 bp, Botrytis fragariae; identical to SEQ ID NO: 5205
  source 1..30: mol_type = other DNA

SEQ ID NO: 5364 - DNA, 30 bp, Botrytis cinerea
  source 1..30: mol_type = other DNA
cttgcatggctgtccggggcgtccgcacca

SEQ ID NO: 5365 - DNA, 30 bp, Botrytis cinerea; identical to SEQ ID NO: 5364
  source 1..30: mol_type = other DNA

SEQ ID NO: 5366 - DNA, 30 bp, Botrytis cinerea; identical to SEQ ID NO: 5364
  source 1..30: mol_type = other DNA

SEQ ID NO: 5367 - DNA, 30 bp, Botrytis fragariae
  source 1..30: mol_type = other DNA
cttgcatggttgaccagggcgtccgcacca

SEQ ID NO: 5368 - DNA, 30 bp, Botrytis galanthina; identical to SEQ ID NO: 4972
  source 1..30: mol_type = other DNA

SEQ ID NO: 5369 - DNA, 30 bp, Botrytis cinerea; identical to SEQ ID NO: 4972
  source 1..30: mol_type = other DNA

SEQ ID NO: 5370 - DNA, 30 bp, Botrytis cinerea; identical to SEQ ID NO: 4972
  source 1..30: mol_type = other DNA

SEQ ID NO: 5371 - DNA, 30 bp, Botrytis cinerea; identical to SEQ ID NO: 4972
  source 1..30: mol_type = other DNA

SEQ ID NO: 5372 - DNA, 30 bp, Botryotinia narcissicola
  source 1..30: mol_type = other DNA
cttgcatggttgtccgggacgtccacacca

SEQ ID NO: 5373 - DNA, 36 bp, Colletotrichum gloeosporioides
  source 1..36: mol_type = other DNA
gcgcttccagcacggttggccaggcttggtgcacca

SEQ ID NO: 5374 - DNA, 36 bp, Diaporthe helianthi
  source 1..36: mol_type = other DNA
gcgcttccagcagccctcgcccttccagaaacacca

SEQ ID NO: 5375 - DNA, 36 bp, Valsa mali
  source 1..36: mol_type = other DNA
gcgcttccagcatccctcgcccttgaacaggcacca

SEQ ID NO: 5376 - DNA, 42 bp, Ophiocordyceps camponoti-rufipedis
  source 1..42: mol_type = other DNA
gcgcttgaccttggagcagatggagttgggacgcttgcacca

SEQ ID NO: 5377 - DNA, 33 bp, Monilinia fructicola
  source 1..33: mol_type = other DNA
gcgcttgcatccttgtccgggacgtccacacca

SEQ ID NO: 5378 - DNA, 33 bp, Botryotinia narcissicola
  source 1..33: mol_type = other DNA
gcgcttgcatggttgaccggggcgtccgcacca

SEQ ID NO: 5379 - DNA, 42 bp, Lophiostoma macrostomum
  source 1..42: mol_type = other DNA
gcgcttggcctttccacagggctggccgcggtagtggcagaa

SEQ ID NO: 5380 - DNA, 39 bp, Lophium mytilinum
  source 1..39: mol_type = other DNA
gcgcttttctttggagcaagattggcctgggagatggca

SEQ ID NO: 5381 - DNA, 36 bp, Colletotrichum siamense
  source 1..36: mol_type = other DNA
gcgtttccagcagggctggccaggtttggtgcacca

SEQ ID NO: 5382 - DNA, 36 bp, Colletotrichum siamense; identical to SEQ ID NO: 5381
  source 1..36: mol_type = other DNA

SEQ ID NO: 5383 - DNA, 36 bp, Colletotrichum siamense; identical to SEQ ID NO: 5243
  source 1..36: mol_type = other DNA

SEQ ID NO: 5384 - DNA, 33 bp, Sclerotinia sclerotiorum
  source 1..33: mol_type = other DNA
gcgtttgcatggttgtccgggacgtccacacca

SEQ ID NO: 5385 - DNA, 42 bp, Lasiodiplodia theobromae
  source 1..42: mol_type = other DNA
gcgttttttgtggcaaggctgtccacggatgcggccacagaa

SEQ ID NO: 5386 - DNA, 42 bp, Lasiodiplodia theobromae; identical to SEQ ID NO: 5385
  source 1..42: mol_type = other DNA

SEQ ID NO: 5387 - DNA, 42 bp, Ophiocordyceps camponoti-floridani
  source 1..42: mol_type = other DNA
ggacctcttggggccgcactgcgagttgggacggtagcacca

SEQ ID NO: 5388 - DNA, 27 bp, Lophium mytilinum
  source 1..27: mol_type = other DNA
ggagcaagattgaccggggagatggca

SEQ ID NO: 5389 - DNA, 42 bp, Mytilinidion resinicola
  source 1..42: mol_type = other DNA
tactgccatcttcctggtcaatcttgcagcaaggacaagcgc

SEQ ID NO: 5390 - DNA, 33 bp, Rutstroemia sp.
  source 1..33: mol_type = other DNA; note = NJR-2017a WRK4
tcgcttgcaaggctgtccgggacgaccgcacca

SEQ ID NO: 5391 - DNA, 33 bp, Venustampulla echinocandica
  source 1..33: mol_type = other DNA
tctcttccagcagccttgtccgacgtgggtgca

SEQ ID NO: 5392 - DNA, 42 bp, Metarhizium anisopliae; identical to SEQ ID NO: 3973
  source 1..42: mol_type = other DNA

SEQ ID NO: 5393 - DNA, 42 bp, Metarhizium anisopliae; identical to SEQ ID NO: 3973
  source 1..42: mol_type = other DNA

SEQ ID NO: 5394 - DNA, 42 bp, Metarhizium anisopliae; identical to SEQ ID NO: 3973
  source 1..42: mol_type = other DNA

SEQ ID NO: 5395 - DNA, 42 bp, Metarhizium anisopliae; identical to SEQ ID NO: 3973
  source 1..42: mol_type = other DNA

SEQ ID NO: 5396 - DNA, 33 bp, Sodiomyces alkalinus
  source 1..33: mol_type = other DNA
tgcaccaagcctggccagccatgctggaagcgt

SEQ ID NO: 5397 - DNA, 33 bp, Dothistroma septosporum
  source 1..33: mol_type = other DNA
tgcaccgtgccaggtcttgcatgtggcaagcgt

SEQ ID NO: 5398 - DNA, 39 bp, Mytilinidion resinicola
  source 1..39: mol_type = other DNA
tgccatctgcccggccagtcttgcagcaaggacaaacgc

SEQ ID NO: 5399 - DNA, 39 bp, Diplocarpon rosae
  source 1..39: mol_type = other DNA
tgcggacaccccggtcagccatgtggaaaggcgaagcgt

SEQ ID NO: 5400 - DNA, 39 bp, Diplocarpon rosae
  source 1..39: mol_type = other DNA
tgcggtcaccctggtcagccatgtggaaaggcgaagcgt

SEQ ID NO: 5401 - DNA, 39 bp, Aspergillus fumigatiaffinis; identical to SEQ ID NO: 5262
  source 1..39: mol_type = other DNA

SEQ ID NO: 5402 - DNA, 36 bp, Colletotrichum tropicale; identical to SEQ ID NO: 5067
  source 1..36: mol_type = other DNA

SEQ ID NO: 5403 - DNA, 36 bp, Colletotrichum aenigma; identical to SEQ ID NO: 5067
  source 1..36: mol_type = other DNA

SEQ ID NO: 5404 - DNA, 33 bp, Neurospora tetrasperma
  source 1..33: mol_type = other DNA
tggtgccgcattcacggtcagtcctgctggaag

SEQ ID NO: 5405 - DNA, 36 bp, Cytospora leucostoma
  source 1..36: mol_type = other DNA
tggtgcctgctcaagggccaggggtgctggaagcgc

SEQ ID NO: 5406 - DNA, 33 bp, Valsa mali
  source 1..33: mol_type = other DNA
tggtgcctgttcaagggtgagggctgctggaag

SEQ ID NO: 5407 - DNA, 36 bp, Valsa mali
  source 1..36: mol_type = other DNA
tggtgcctgttcaagggtgagggctgctggaagcgg

SEQ ID NO: 5408 - DNA, 33 bp, Valsa sordida
  source 1..33: mol_type = other DNA
tggtgcctgttgaagggccagggctgctggaag

SEQ ID NO: 5409 - DNA, 42 bp, Valsa sordida
  source 1..42: mol_type = other DNA
tggtgcctgttgaagggccagggctgctggaaggtcaagcgt

SEQ ID NO: 5410 - DNA, 33 bp, Coniella lustricola; identical to SEQ ID NO: 5292
  source 1..33: mol_type = other DNA

SEQ ID NO: 5411 - DNA, 36 bp, Coniella lustricola
  source 1..36: mol_type = other DNA
tggtgccttttccacggcgagggctgctggaagcgc

SEQ ID NO: 5412 - DNA, 33 bp, Botrytis elliptica; identical to SEQ ID NO: 4832
  source 1..33: mol_type = other DNA

SEQ ID NO: 5413 - DNA, 30 bp, Botryotinia convoluta; identical to SEQ ID NO: 938
  source 1..30: mol_type = other DNA

SEQ ID NO: 5414 - DNA, 33 bp, Botryotinia convoluta; identical to SEQ ID NO: 5301
  source 1..33: mol_type = other DNA

SEQ ID NO: 5415 - DNA, 30 bp, Botrytis hyacinthi; identical to SEQ ID NO: 5126
  source 1..30: mol_type = other DNA

SEQ ID NO: 5416 - DNA, 33 bp, Botrytis hyacinthi
  source 1..33: mol_type = other DNA
tggtgcggacgtcccggacaaccatgcaagcgc

SEQ ID NO: 5417 - DNA, 33 bp, Monilinia laxa
  source 1..33: mol_type = other DNA
tggtgcggacgtcccggacaaggatgcaagaga

SEQ ID NO: 5418 - DNA, 30 bp, Sclerotinia sclerotiorum
  source 1..30: mol_type = other DNA
tggtgcggacgtcccggtcaaccatgcaag

SEQ ID NO: 5419 - DNA, 33 bp, Sclerotinia sclerotiorum
  source 1..33: mol_type = other DNA
tggtgcggacgtcccggtcaaccatgcaagcgt

SEQ ID NO: 5420 - DNA, 30 bp, Botrytis paeoniae
  source 1..30: mol_type = other DNA
tggtgcggacgtcccggtcaaccatgtaag

SEQ ID NO: 5421 - DNA, 33 bp, Botrytis paeoniae
  source 1..33: mol_type = other DNA
tggtgcggacgtcccggtcaaccatgtaagcgt

SEQ ID NO: 5422 - DNA, 30 bp, Rutstroemia sp.
  source 1..30: mol_type = other DNA; note = NJR-2017a BVV2
tggtgcggccgtcccggacaaccctgcaaa

SEQ ID NO: 5423 - DNA, 33 bp, Rutstroemia sp.
  source 1..33: mol_type = other DNA; note = NJR-2017a BVV2
tggtgcggccgtcccggacaaccctgcaaacgc

SEQ ID NO: 5424 - DNA, 33 bp, Rutstroemia sp.
  source 1..33: mol_type = other DNA; note = NJR-2017a BBW
tggtgcggccgtcccggacaaccgtgcaagcgg

SEQ ID NO: 5425 - DNA, 30 bp, Rutstroemia sp.
  source 1..30: mol_type = other DNA; note = NJR-2017a BBW
tggtgcggccgtcccggccaaccctgcaaa

SEQ ID NO: 5426 - DNA, 27 bp, Botrytis hyacinthi
  source 1..27: mol_type = other DNA
tggtgcgggcgcccaggacaaccatgc

SEQ ID NO: 5427 - DNA, 42 bp, Diaporthe ampelina
  source 1..42: mol_type = other DNA
tggtgcttctggaagggccagggctgctggaaggccaagcgc

SEQ ID NO: 5428 - DNA, 36 bp, Diaporthe ampelina
  source 1..36: mol_type = other DNA
tggtgcttctggaagggccaggggtgctggaagcgc

SEQ ID NO: 5429 - DNA, 33 bp, Coniella lustricola
  source 1..33: mol_type = other DNA
tggtgcttgttccacggtgagggatgctggaag

SEQ ID NO: 5430 - DNA, 36 bp, Colletotrichum siamense
  source 1..36: mol_type = other DNA
tggtgtaccaagcccggacagccatgctggaagcgt

SEQ ID NO: 5431 - DNA, 30 bp, Botryotinia calthae
  source 1..30: mol_type = other DNA
tggtgtggacgccccggacaaccatgcaaa

SEQ ID NO: 5432 - DNA, 33 bp, Botryotinia calthae; identical to SEQ ID NO: 5321
  source 1..33: mol_type = other DNA

SEQ ID NO: 5433 - DNA, 33 bp, Sclerotinia borealis
  source 1..33: mol_type = other DNA
tggtgtggacgccctggacaaccttgcaagaga

SEQ ID NO: 5434 - DNA, 18 bp, Aspergillus fumigatiaffinis
  source 1..18: mol_type = other DNA
tggtgtttgatacccggt

SEQ ID NO: 5435 - DNA, 30 bp, Cadophora sp.
  source 1..30: mol_type = other DNA; note = DSE1049
tgtggacatcccggacaaccttgcggcaag

SEQ ID NO: 5436 - DNA, 33 bp, Cadophora sp.
  source 1..33: mol_type = other DNA; note = DSE1049
tgtggacatcccggacaaccttgcggcaagcgt

SEQ ID NO: 5437 - DNA, 39 bp, Hyaloscypha bicolor
  source 1..39: mol_type = other DNA
tgtggagctcgcggacagccctgtggcaaggccaagcgt

SEQ ID NO: 5438 - DNA, 30 bp, Rutstroemia sp.
  source 1..30: mol_type = other DNA; note = NJR-2017a WRK4
tttgcagggttggccggggcggccgcacca

SEQ ID NO: 5439 - DNA, 30 bp, Sclerotinia sclerotiorum
  source 1..30: mol_type = other DNA
tttgcagggttgtccggggcgtccgcacca

SEQ ID NO: 5440 - DNA, 36 bp, Lasiodiplodia theobromae
  source 1..36: mol_type = other DNA
tttgtggcaaggctgtccacggatgcggccacagaa

SEQ ID NO: 5441 - DNA, 36 bp, Lasiodiplodia theobromae; identical to SEQ ID NO: 5440
  source 1..36: mol_type = other DNA

SEQ ID NO: 5442 - DNA, 33 bp, Botrytis fragariae; identical to SEQ ID NO: 5341
  source 1..33: mol_type = other DNA

SEQ ID NO: 5443 - DNA, 33 bp, Botrytis fragariae; identical to SEQ ID NO: 5172
  source 1..33: mol_type = other DNA

SEQ ID NO: 5444 - DNA, 33 bp, Botrytis galanthina
  source 1..33: mol_type = other DNA
acgtttgcatggttgtcctgggcgtccgcacca

SEQ ID NO: 5445 - DNA, 39 bp, Botrytis cinerea
  source 1..39: mol_type = other DNA
agcttctctcttgcatggttgtcctgggcgtccgcacca

SEQ ID NO: 5446 - DNA, 39 bp, Botrytis cinerea; identical to SEQ ID NO: 5445
  source 1..39: mol_type = other DNA

SEQ ID NO: 5447 - DNA, 39 bp, Botrytis cinerea; identical to SEQ ID NO: 5445
  source 1..39: mol_type = other DNA

SEQ ID NO: 5448 - DNA, 36 bp, Botrytis fragariae
  source 1..36: mol_type = other DNA
atcacgtttgcaaggttgtcctgggcgtccacacca

SEQ ID NO: 5449 - DNA, 42 bp, Ophiocordyceps camponoti-floridani; identical to SEQ ID NO: 5352
  source 1..42: mol_type = other DNA

SEQ ID NO: 5450 - DNA, 42 bp, Ophiocordyceps camponoti-floridani
  source 1..42: mol_type = other DNA
cctcttgaccttggagcagattgagttgggtcgcgtgcacca

SEQ ID NO: 5451 - DNA, 42 bp, Ophiocordyceps camponoti-floridani; identical to SEQ ID NO: 5450
  source 1..42: mol_type = other DNA

SEQ ID NO: 5452 - DNA, 42 bp, Ophiocordyceps camponoti-floridani; identical to SEQ ID NO: 5450
  source 1..42: mol_type = other DNA

SEQ ID NO: 5453 - DNA, 36 bp, Dothistroma septosporum
  source 1..36: mol_type = other DNA
cgatgcactgttccaggtcttgcttgcggaaagcga

SEQ ID NO: 5454 - DNA, 33 bp, Cryphonectria parasitica; identical to SEQ ID NO: 5360
  source 1..33: mol_type = other DNA

SEQ ID NO: 5455 - DNA, 30 bp, Botrytis cinerea; identical to SEQ ID NO: 5364
  source 1..30: mol_type = other DNA

SEQ ID NO: 5456 - DNA, 30 bp, Botrytis cinerea; identical to SEQ ID NO: 5364
  source 1..30: mol_type = other DNA

SEQ ID NO: 5457 - DNA, 30 bp, Botrytis cinerea; identical to SEQ ID NO: 5364
  source 1..30: mol_type = other DNA

SEQ ID NO: 5458 - DNA, 30 bp, Botrytis fragariae; identical to SEQ ID NO: 4972
  source 1..30: mol_type = other DNA

SEQ ID NO: 5459 - DNA, 30 bp, Botrytis fragariae; identical to SEQ ID NO: 4972
  source 1..30: mol_type = other DNA

SEQ ID NO: 5460 - DNA, 30 bp, Botrytis galanthina; identical to SEQ ID NO: 5372
  source 1..30: mol_type = other DNA

SEQ ID NO: 5461 - DNA, 30 bp, Botrytis cinerea; identical to SEQ ID NO: 5372
  source 1..30: mol_type = other DNA

SEQ ID NO: 5462 - DNA, 30 bp, Botrytis cinerea; identical to SEQ ID NO: 5372
  source 1..30: mol_type = other DNA

SEQ ID NO: 5463 - DNA, 30 bp, Botrytis cinerea; identical to SEQ ID NO: 5372
  source 1..30: mol_type = other DNA

SEQ ID NO: 5464 - DNA, 30 bp, Botrytis tulipae
  source 1..30: mol_type = other DNA
cttgcatggttgtcctgggcgtccacacca

SEQ ID NO: 5465 - DNA, 30 bp, Botryotinia narcissicola
  source 1..30: mol_type = other DNA
cttgcatggttgtcctgggcgtccgcacca

SEQ ID NO: 5466 - DNA, 36 bp, Cryphonectria parasitica
  source 1..36: mol_type = other DNA
gcgcttccagcagccctcgccgtggaacaggcacca

SEQ ID NO: 5467 - DNA, 42 bp, Cryphonectria parasitica
  source 1..42: mol_type = other DNA
gcgcttgaccttccagcagccctcaccgtggaagagacacca

SEQ ID NO: 5468 - DNA, 33 bp, Botrytis cinerea
  source 1..33: mol_type = other DNA
gcgcttgcatggttgtccgggacgtccacacca

SEQ ID NO: 5469 - DNA, 33 bp, Botrytis cinerea; identical to SEQ ID NO: 5468
  source 1..33: mol_type = other DNA

SEQ ID NO: 5470 - DNA, 33 bp, Botrytis cinerea; identical to SEQ ID NO: 5468
  source 1..33: mol_type = other DNA

SEQ ID NO: 5471 - DNA, 33 bp, Botryotinia narcissicola; identical to SEQ ID NO: 5468
  source 1..33: mol_type = other DNA

SEQ ID NO: 5472 - DNA, 42 bp, Lophiostoma macrostomum
  source 1..42: mol_type = other DNA
gcgcttggctttgccgcagggttggccgcggtagtggcagaa

SEQ ID NO: 5473 - DNA, 36 bp, Colletotrichum gloeosporioides
  source 1..36: mol_type = other DNA
gcgtttccagcagggctggccgggtttggtgcacca

SEQ ID NO: 5474 - DNA, 27 bp, Lophium mytilinum
  source 1..27: mol_type = other DNA
ggagcaagattgacctgggagatggca

SEQ ID NO: 5475 - DNA, 30 bp, Ophiocordyceps camponoti-floridani
  source 1..30: mol_type = other DNA
ggagcagatggagttgggacgtgtgcacca

SEQ ID NO: 5476 - DNA, 33 bp, Sclerotinia sclerotiorum
  source 1..33: mol_type = other DNA
tctcttacaaggttgaccaggacgtccgcacca

SEQ ID NO: 5477 - DNA, 33 bp, Monilinia fructigena
  source 1..33: mol_type = other DNA
tctcttgcatccttgtccgggacgtccgcacca

SEQ ID NO: 5478 - DNA, 33 bp, Monilinia fructicola; identical to SEQ ID NO: 5477
  source 1..33: mol_type = other DNA

SEQ ID NO: 5479 - DNA, 33 bp, Dothistroma septosporum
  source 1..33: mol_type = other DNA
tgcaccgttccgggtctcgcatgcggtaagcgt

SEQ ID NO: 5480 - DNA, 39 bp, Mytilinidion resinicola
  source 1..39: mol_type = other DNA
tgccatcttccgggacagtcttgtagcaaggacaagcgc

SEQ ID NO: 5481 - DNA, 33 bp, Botrytis elliptica; identical to SEQ ID NO: 5301
  source 1..33: mol_type = other DNA

SEQ ID NO: 5482 - DNA, 33 bp, Monilinia laxa
  source 1..33: mol_type = other DNA
tggtgcggacgtcccggccaaggttgcaagcgt

SEQ ID NO: 5483 - DNA, 30 bp, Botryotinia convoluta
  source 1..30: mol_type = other DNA
tggtgcggacgtcctggacaaccatgtaag

SEQ ID NO: 5484 - DNA, 33 bp, Botryotinia convoluta
  source 1..33: mol_type = other DNA
tggtgcggacgtcctggacaaccatgtaagcgt

SEQ ID NO: 5485 - DNA, 30 bp, Sclerotinia sclerotiorum
  source 1..30: mol_type = other DNA
tggtgcggacgtcctggtcaaccttgtaag

SEQ ID NO: 5486 - DNA, 33 bp, Sclerotinia sclerotiorum
  source 1..33: mol_type = other DNA
tggtgcggacgtcctggtcaaccttgtaagaga

SEQ ID NO: 5487 - DNA, 33 bp, Rutstroemia sp.
  source 1..33: mol_type = other DNA; note = NJR-2017a BBW
tggtgcggccgtcccggccaaccctgcaaacgc

SEQ ID NO: 5488 - DNA, 30 bp, Rutstroemia sp.
  source 1..30: mol_type = other DNA; note = NJR-2017a BVV2
tggtgcggccgtcccgggcaaccctgcaag

SEQ ID NO: 5489 - DNA, 33 bp, Rutstroemia sp.
  source 1..33: mol_type = other DNA; note = NJR-2017a BVV2
tggtgcggccgtcccgggcaaccctgcaagcgt

SEQ ID NO: 5490 - DNA, 30 bp, Botrytis hyacinthi
  source 1..30: mol_type = other DNA
tggtgcgggcgcccaggacaaccatgcaag

SEQ ID NO: 5491 - DNA, 33 bp, Botrytis hyacinthi
  source 1..33: mol_type = other DNA
tggtgcgggcgcccaggacaaccatgcaagcgt

SEQ ID NO: 5492 - DNA, 30 bp, Rutstroemia sp.
  source 1..30: mol_type = other DNA; note = NJR-2017a BBW
tggtgcggtcgtcccggacagccttgcaag

SEQ ID NO: 5493 - DNA, 33 bp, Diaporthe ampelina
  source 1..33: mol_type = other DNA
tggtgcttctggaagggccaggggtgctggaag

SEQ ID NO: 5494 - DNA, 33 bp, Coniella lustricola; identical to SEQ ID NO: 5429
  source 1..33: mol_type = other DNA

SEQ ID NO: 5495 - DNA, 36 bp, Coniella lustricola
  source 1..36: mol_type = other DNA
tggtgcttgttccacggtgagggatgctggaagcgt

SEQ ID NO: 5496 - DNA, 36 bp, Colletotrichum aenigma; identical to SEQ ID NO: 5430
  source 1..36: mol_type = other DNA

SEQ ID NO: 5497 - DNA, 36 bp, Colletotrichum siamense
  source 1..36: mol_type = other DNA
tggtgtaccaagcccggccaaccgtgctggaagcgc

SEQ ID NO: 5498 - DNA, 33 bp, Metarhizium anisopliae
  source 1..33: mol_type = other DNA
tggtgtcgcgcgccaggaagacgagcttggcgg

SEQ ID NO: 5499 - DNA, 33 bp, Coniella lustricola
  source 1..33: mol_type = other DNA
tggtgtctcttccacggcgaaggttgctggaag

SEQ ID NO: 5500 - DNA, 27 bp, Botrytis hyacinthi
  source 1..27: mol_type = other DNA
tggtgtggacgcccaggacaaccatgt

SEQ ID NO: 5501 - DNA, 30 bp, Botrytis paeoniae
  source 1..30: mol_type = other DNA
tggtgtggacgcccaggacaaccttgcaaa

SEQ ID NO: 5502 - DNA, 33 bp, Botrytis paeoniae
  source 1..33: mol_type = other DNA
tggtgtggacgcccaggacaaccttgcaaacgt

SEQ ID NO: 5503 - DNA, 30 bp, Botryotinia calthae; identical to SEQ ID NO: 441
  source 1..30: mol_type = other DNA

SEQ ID NO: 5504 - DNA, 33 bp, Botryotinia calthae
  source 1..33: mol_type = other DNA
tggtgtggacgtcccggacaaccatgcaagcgt

SEQ ID NO: 5505 - DNA, 18 bp, Aspergillus fumigatiaffinis
  source 1..18: mol_type = other DNA
tggtgtttgatacccggt

SEQ ID NO: 5506 - DNA, 39 bp, Diplocarpon rosae
  source 1..39: mol_type = other DNA
tgtggacaccctggacaaccttgcggaaaggccaagcgt

SEQ ID NO: 5507 - DNA, 30 bp, Cadophora sp.
  source 1..30: mol_type = other DNA; note = DSE1049
tgtggccacccaggtcagccatgcggcaaa

SEQ ID NO: 5508 - DNA, 30 bp, Cadophora sp.
  source 1..30: mol_type = other DNA; note = DSE1049
tgtggtcacccaggccaaccctgtggcaag

SEQ ID NO: 5509 - DNA, 30 bp, Venustampulla echinocandica
  source 1..30: mol_type = other DNA
tttccagcagccctggccgacgtgggtgca

SEQ ID NO: 5510 - DNA, 30 bp, Rutstroemia sp.
  source 1..30: mol_type = other DNA; note = NJR-2017a WRK4
tttgcagggttgcccggggcggccgcacca

SEQ ID NO: 5511 - DNA, 30 bp, Sclerotinia sclerotiorum
  source 1..30: mol_type = other DNA; note = 1980 UF-70
tttgcatggttgtccgggacgtccacacca

SEQ ID NO: 5512 - DNA, 33 bp, Botrytis fragariae; identical to SEQ ID NO: 5172
  source 1..33: mol_type = other DNA

SEQ ID NO: 5513 - DNA, 33 bp, Botrytis fragariae; identical to SEQ ID NO: 4914
  source 1..33: mol_type = other DNA

SEQ ID NO: 5514 - DNA, 36 bp, Botrytis fragariae
  source 1..36: mol_type = other DNA
atcgcgcttgcatggctgtccgggacggccacacca

SEQ ID NO: 5515 - DNA, 42 bp, Ophiocordyceps camponoti-floridani; identical to SEQ ID NO: 5450
  source 1..42: mol_type = other DNA

SEQ ID NO: 5516 - DNA, 39 bp, Ophiocordyceps camponoti-floridani
  source 1..39: mol_type = other DNA
cctcttggggccgcactgcgagttgggacggtagcacca

SEQ ID NO: 5517 - DNA, 36 bp, Dothistroma septosporum
  source 1..36: mol_type = other DNA
cgatgtaccgttccaggtcttgcttgtggcaagcgt

SEQ ID NO: 5518 - DNA, 30 bp, Botrytis cinerea; identical to SEQ ID NO: 5364
  source 1..30: mol_type = other DNA

SEQ ID NO: 5519 - DNA, 30 bp, Botrytis cinerea; identical to SEQ ID NO: 5364
  source 1..30: mol_type = other DNA

SEQ ID NO: 5520 - DNA, 30 bp, Botrytis cinerea; identical to SEQ ID NO: 5364
  source 1..30: mol_type = other DNA

SEQ ID NO: 5521 - DNA, 30 bp, Botrytis galanthina
  source 1..30: mol_type = other DNA
cttgcatggttgtccggggcgtccgcacca

SEQ ID NO: 5522 - DNA, 30 bp, Botrytis tulipae; identical to SEQ ID NO: 5521
  source 1..30: mol_type = other DNA

SEQ ID NO: 5523 - DNA, 30 bp, Botrytis fragariae; identical to SEQ ID NO: 5465
  source 1..30: mol_type = other DNA

SEQ ID NO: 5524 - DNA, 30 bp, Botrytis fragariae; identical to SEQ ID NO: 5465
  source 1..30: mol_type = other DNA

SEQ ID NO: 5525 - DNA, 30 bp, Botrytis galanthina; identical to SEQ ID NO: 5465
  source 1..30: mol_type = other DNA

SEQ ID NO: 5526 - DNA, 30 bp, Botrytis cinerea; identical to SEQ ID NO: 5465
  source 1..30: mol_type = other DNA

SEQ ID NO: 5527 - DNA, 30 bp, Botrytis cinerea; identical to SEQ ID NO: 5465
  source 1..30: mol_type = other DNA

SEQ ID NO: 5528 - DNA, 30 bp, Botrytis cinerea; identical to SEQ ID NO: 5465
  source 1..30: mol_type = other DNA

SEQ ID NO: 5529 - DNA, 30 bp, Botrytis tulipae; identical to SEQ ID NO: 5465
  source 1..30: mol_type = other DNA

SEQ ID NO: 5530 - DNA, 27 bp, Ophiocordyceps camponoti-floridani
  source 1..27: mol_type = other DNA
gcactgcgagttgggacgcgtgcacca

SEQ ID NO: 5531 - DNA, 27 bp, Ophiocordyceps camponoti-floridani
  source 1..27: mol_type = other DNA
gcactgcgagttgggacgcgtgcacca

SEQ ID NO: 5532 - DNA, 33 bp, Botrytis cinerea
  source 1..33: mol_type = other DNA
gcgcttacatggctgtcctgggcgtccgcacca

SEQ ID NO: 5533 - DNA, 33 bp, Botrytis cinerea; identical to SEQ ID NO: 5532
  source 1..33: mol_type = other DNA

SEQ ID NO: 5534 - DNA, 33 bp, Botrytis cinerea; identical to SEQ ID NO: 5532
  source 1..33: mol_type = other DNA

SEQ ID NO: 5535 - DNA, 36 bp, Cryphonectria parasitica
  source 1..36: mol_type = other DNA
gcgcttccagcagccctcgccgtggaagaggcacca

SEQ ID NO: 5536 - DNA, 42 bp, Cryphonectria parasitica
  source 1..42: mol_type = other DNA
gcgcttctccttccagcagccctcgccgtggaagagacacca

SEQ ID NO: 5537 - DNA, 33 bp, Botryotinia narcissicola
  source 1..33: mol_type = other DNA
gcgtttgcatggttgtccgggacgtccgcacca

SEQ ID NO: 5538 - DNA, 27 bp, Lophium mytilinum
  source 1..27: mol_type = other DNA
ggagcaagattggccggggagatggca

SEQ ID NO: 5539 - DNA, 30 bp, Ophiocordyceps camponoti-floridani
  source 1..30: mol_type = other DNA
ggagcagatggagttggggcgcgtgcacca

SEQ ID NO: 5540 - DNA, 36 bp, Botrytis cinerea
  source 1..36: mol_type = other DNA
ggtacgcttgcatggttgtcctgggcgtccgcacca

SEQ ID NO: 5541 - DNA, 36 bp, Botrytis cinerea; identical to SEQ ID NO: 5540
  source 1..36: mol_type = other DNA

SEQ ID NO: 5542 - DNA, 36 bp, Botrytis cinerea; identical to SEQ ID NO: 5540
  source 1..36: mol_type = other DNA

SEQ ID NO: 5543 - DNA, 33 bp, Dothistroma septosporum
  source 1..33: mol_type = other DNA
tgcactgtcccaggcctcgcctgcggcaaacga

SEQ ID NO: 5544 - DNA, 39 bp, Mytilinidion resinicola
  source 1..39: mol_type = other DNA
tgccatcttccgggccagtcttgcagcaaggacaagcgc

SEQ ID NO: 5545 - DNA, 33 bp, Rutstroemia sp.
  source 1..33: mol_type = other DNA; note = NJR-2017a BBW
tggtgcggtcgtcccggacagccttgcaagcga

SEQ ID NO: 5546 - DNA, 30 bp, Rutstroemia sp.
  source 1..30: mol_type = other DNA; note = NJR-2017a BVV2
tggtgcggtcgtcctggacagccttgcaag

SEQ ID NO: 5547 - DNA, 33 bp, Rutstroemia sp.
  source 1..33: mol_type = other DNA; note = NJR-2017a BVV2
tggtgcggtcgtcctggacagccttgcaagaga

SEQ ID NO: 5548 - DNA, 33 bp, Coniella lustricola; identical to SEQ ID NO: 5499
  source 1..33: mol_type = other DNA

SEQ ID NO: 5549 - DNA, 36 bp, Coniella lustricola
  source 1..36: mol_type = other DNA
tggtgtctcttccacggcgaaggttgctggaagcgc

SEQ ID NO: 5550 - DNA, 42 bp, Coniella lustricola
  source 1..42: mol_type = other DNA
tggtgtctcttccacggtgagggttgctggaaggtcaagcgc

SEQ ID NO: 5551 - DNA, 30 bp, Botrytis hyacinthi
  source 1..30: mol_type = other DNA
tggtgtggacgcccaggacaaccatgtaag

SEQ ID NO: 5552 - DNA, 33 bp, Botrytis hyacinthi
  source 1..33: mol_type = other DNA
tggtgtggacgcccaggacaaccatgtaagcgc

SEQ ID NO: 5553 - DNA, 33 bp, Botrytis elliptica; identical to SEQ ID NO: 5320
  source 1..33: mol_type = other DNA

SEQ ID NO: 5554 - DNA, 27 bp, Botrytis hyacinthi
  source 1..27: mol_type = other DNA
tggtgtggacgcccaggacaaccttgc

SEQ ID NO: 5555 - DNA, 30 bp, Sclerotinia sclerotiorum
  source 1..30: mol_type = other DNA
tggtgtggacgtcccggacaaccatgcaaa

SEQ ID NO: 5556 - DNA, 33 bp, Sclerotinia sclerotiorum
  source 1..33: mol_type = other DNA
tggtgtggacgtcccggacaaccatgcaaacgc

SEQ ID NO: 5557 - DNA, 30 bp, Botryotinia convoluta; identical to SEQ ID NO: 441
  source 1..30: mol_type = other DNA

SEQ ID NO: 5558 - DNA, 33 bp, Botryotinia convoluta; identical to SEQ ID NO: 5504
  source 1..33: mol_type = other DNA

SEQ ID NO: 5559 - DNA, 30 bp, Botryotinia calthae; identical to SEQ ID NO: 932
  source 1..30: mol_type = other DNA

SEQ ID NO: 5560 - DNA, 33 bp, Botryotinia calthae
  source 1..33: mol_type = other DNA
tggtgtggacgtcccgggcaaccatgcaagcgc

SEQ ID NO: 5561 - DNA, 30 bp, Botrytis paeoniae
  source 1..30: mol_type = other DNA
tggtgtggacgtcctggacaaccatgcaag

SEQ ID NO: 5562 - DNA, 33 bp, Botrytis paeoniae
  source 1..33: mol_type = other DNA
tggtgtggacgtcctggacaaccatgcaagaga

SEQ ID NO: 5563 - DNA, 33 bp, Cadophora sp.
  source 1..33: mol_type = other DNA; note = DSE1049
tgtggtcacccaggccaaccctgtggcaagcgt

SEQ ID NO: 5564 - DNA, 39 bp, Cadophora sp.
  source 1..39: mol_type = other DNA; note = DSE1049
tgtggtcacccaggccagccctgcggaaaggccaaacgt

SEQ ID NO: 5565 - DNA, 30 bp, Botryotinia narcissicola
  source 1..30: mol_type = other DNA
tttacatggttgaccggggcgtccgcacca

SEQ ID NO: 5566 - DNA, 30 bp, Sclerotinia sclerotiorum
  source 1..30: mol_type = other DNA
tttgcatggttggccggggcgtccgcacca

SEQ ID NO: 5567 - DNA, 30 bp, Sclerotinia sclerotiorum
  source 1..30: mol_type = other DNA
tttgcatggttgtccgggacgtccgcacca

SEQ ID NO: 5568 - DNA, 33 bp, Botrytis fragariae; identical to SEQ ID NO: 4914
  source 1..33: mol_type = other DNA

SEQ ID NO: 5569 - DNA, 39 bp, Ophiocordyceps camponoti-floridani; identical to SEQ ID NO: 5516
  source 1..39: mol_type = other DNA

SEQ ID NO: 5570 - DNA, 36 bp, Dothistroma septosporum
  source 1..36: mol_type = other DNA; strain = NZE10
cgatgtactgtcccgggcctcgcctgtggcaagcgg

SEQ ID NO: 5571 - DNA, 36 bp, Botrytis fragariae
  source 1..36: mol_type = other DNA
ctcacgtttacatggttgcccggggcgtccgcacca

SEQ ID NO: 5572 - DNA, 33 bp, Botrytis fragariae
  source 1..33: mol_type = other DNA
ctccttgcatggttgaccagggcgtccgcacca

SEQ ID NO: 5573 - DNA, 39 bp, Botrytis fragariae
  source 1..39: mol_type = other DNA
cttggccttgcggcaaggttgtcctggacgtccgcacca

SEQ ID NO: 5574 - DNA, 36 bp, Ophiocordyceps camponoti-floridani
  source 1..36: mol_type = other DNA
cttggggccgcactgcgagttgggacgcgtgcacca

SEQ ID NO: 5575 - DNA, 27 bp, Ophiocordyceps camponoti-floridani
  source 1..27: mol_type = other DNA
gcactgcgagttgggacggtagcacca

SEQ ID NO: 5576 - DNA, 27 bp, Ophiocordyceps camponoti-floridani
  source 1..27: mol_type = other DNA
gcactgcgagttgggacggtagcacca

SEQ ID NO: 5577 - DNA, 33 bp, Botrytis galanthina; identical to SEQ ID NO: 5218
  source 1..33: mol_type = other DNA

SEQ ID NO: 5578 - DNA, 33 bp, Botrytis tulipae; identical to SEQ ID NO: 5218
  source 1..33: mol_type = other DNA

SEQ ID NO: 5579 - DNA, 36 bp, Cryphonectria parasitica
  source 1..36: mol_type = other DNA
gcgcttccagcagccttctccgtggaagaggcacca

SEQ ID NO: 5580 - DNA, 33 bp, Botrytis cinerea; identical to SEQ ID NO: 5378
  source 1..33: mol_type = other DNA

SEQ ID NO: 5581 - DNA, 33 bp, Botrytis cinerea; identical to SEQ ID NO: 5378
  source 1..33: mol_type = other DNA

SEQ ID NO: 5582 - DNA, 33 bp, Botrytis cinerea; identical to SEQ ID NO: 5378
  source 1..33: mol_type = other DNA

SEQ ID NO: 5583 - DNA, 42 bp, Botrytis fragariae; identical to SEQ ID NO: 3622
  source 1..42: mol_type = other DNA

SEQ ID NO: 5584 - DNA, 27 bp, Lophium mytilinum
  source 1..27: mol_type = other DNA
ggagcaagattggcctgggagatggca

SEQ ID NO: 5585 - DNA, 33 bp, Botryotinia narcissicola
  source 1..33: mol_type = other DNA
tctcttgcatggttgtcctgggcgtccgcacca

SEQ ID NO: 5586 - DNA, 33 bp, Dothistroma septosporum
  source 1..33: mol_type = other DNA
tgcactgtcccaggtctcgcctgtggcaaacgc

SEQ ID NO: 5587 - DNA, 39 bp, Mytilinidion resinicola
  source 1..39: mol_type = other DNA
tgccatcttcctggtcaatcttgcagcaaggacaagcgc

SEQ ID NO: 5588 - DNA, 33 bp, Ophiocordyceps camponoti-floridani
  source 1..33: mol_type = other DNA
tggctgacaagaccgtccccgagatgcagccct

SEQ ID NO: 5589 - DNA, 33 bp, Coniella lustricola
  source 1..33: mol_type = other DNA
tggtgtctcttccacggcgagggctgctggaaa

SEQ ID NO: 5590 - DNA, 42 bp, Coniella lustricola
  source 1..42: mol_type = other DNA
tggtgtctcttccacggcgagggctgctggaaagagaagcgt

SEQ ID NO: 5591 - DNA, 30 bp, Botrytis hyacinthi; identical to SEQ ID NO: 5501
  source 1..30: mol_type = other DNA

SEQ ID NO: 5592 - DNA, 33 bp, Botrytis hyacinthi; identical to SEQ ID NO: 5502
  source 1..33: mol_type = other DNA

SEQ ID NO: 5593 - DNA, 27 bp, Botrytis hyacinthi
  source 1..27: mol_type = other DNA
tggtgtggacgtcccggacaaccatgc

SEQ ID NO: 5594 - DNA, 33 bp, Botrytis elliptica
  source 1..33: mol_type = other DNA
tggtgtggacgtcccggacaaccatgcaagcgc

SEQ ID NO: 5595 - DNA, 30 bp, Cadophora sp.
  source 1..30: mol_type = other DNA; note = DSE1049
tgtggtcacccaggccagccctgcggaaag

SEQ ID NO: 5596 - DNA, 30 bp, Cadophora sp.
  source 1..30: mol_type = other DNA; note = DSE1049
tgtggtcacccaggtcagccttgcggaaag

SEQ ID NO: 5597 - DNA, 30 bp, Botrytis tulipae; identical to SEQ ID NO: 5565
  source 1..30: mol_type = other DNA

SEQ ID NO: 5598 - DNA, 30 bp, Botrytis cinerea
  source 1..30: mol_type = other DNA
tttacatggttgcccggggcgtccgcacca

SEQ ID NO: 5599 - DNA, 30 bp, Botrytis cinerea; identical to SEQ ID NO: 5598
  source 1..30: mol_type = other DNA

SEQ ID NO: 5600 - DNA, 30 bp, Botrytis cinerea; identical to SEQ ID NO: 5598
  source 1..30: mol_type = other DNA

SEQ ID NO: 5601 - DNA, 30 bp, Botrytis galanthina
  source 1..30: mol_type = other DNA
tttacatggttgtccggggcgtccgcacca

SEQ ID NO: 5602 - DNA, 30 bp, Botryotinia narcissicola
  source 1..30: mol_type = other DNA
tttgcaaggttgtcctgggcgtccacacca

SEQ ID NO: 5603 - DNA, 36 bp, Dothistroma septosporum
  source 1..36: mol_type = other DNA
cgctgcacagtcccaggtcttgcttgcggtaagcga

SEQ ID NO: 5604 - DNA, 36 bp, Botrytis fragariae
  source 1..36: mol_type = other DNA
ctcgcgtttacatggttgtcctgggcgtccgcacca

SEQ ID NO: 5605 - DNA, 30 bp, Botrytis fragariae; identical to SEQ ID NO: 5367
  source 1..30: mol_type = other DNA

SEQ ID NO: 5606 - DNA, 36 bp, Ophiocordyceps camponoti-floridani; identical to SEQ ID NO: 5574
  source 1..36: mol_type = other DNA

SEQ ID NO: 5607 - DNA, 39 bp, Botrytis fragariae
  source 1..39: mol_type = other DNA
cttgttcttgcggcaaggttgtcctgggcgtccgcacca

SEQ ID NO: 5608 - DNA, 42 bp, Ophiocordyceps camponoti-floridani
  source 1..42: mol_type = other DNA
gcgcttgaccttggagcagatggagttgggacgtgtgcacca

SEQ ID NO: 5609 - DNA, 42 bp, Ophiocordyceps camponoti-floridani; identical to SEQ ID NO: 5608
  source 1..42: mol_type = other DNA

SEQ ID NO: 5610 - DNA, 42 bp, Ophiocordyceps camponoti-floridani; identical to SEQ ID NO: 5608
  source 1..42: mol_type = other DNA

SEQ ID NO: 5611 - DNA, 33 bp, Botrytis tulipae
  source 1..33: mol_type = other DNA
gcgcttgcatggctgaccggggcgtccgcacca

SEQ ID NO: 5612 - DNA, 33 bp, Botrytis fragariae
  source 1..33: mol_type = other DNA
gcgcttgcatggctgtccgggacggccacacca

SEQ ID NO: 5613 - DNA, 33 bp, Botrytis galanthina; identical to SEQ ID NO: 5378
  source 1..33: mol_type = other DNA

SEQ ID NO: 5614 - DNA, 33 bp, Botrytis cinerea; identical to SEQ ID NO: 5468
  source 1..33: mol_type = other DNA

SEQ ID NO: 5615 - DNA, 33 bp, Botrytis cinerea; identical to SEQ ID NO: 5468
  source 1..33: mol_type = other DNA

SEQ ID NO: 5616 - DNA, 33 bp, Botrytis cinerea; identical to SEQ ID NO: 5468
  source 1..33: mol_type = other DNA

SEQ ID NO: 5617 - DNA, 42 bp, Botrytis fragariae; identical to SEQ ID NO: 3662
  source 1..42: mol_type = other DNA

SEQ ID NO: 5618 - DNA, 33 bp, Dothistroma septosporum
  source 1..33: mol_type = other DNA
tgcactgtccctggtcttgcttgtgggaagcgg

SEQ ID NO: 5619 - DNA, 33 bp, Coniella lustricola
  source 1..33: mol_type = other DNA
tggtgtctcttccacggtgagggttgctggaag

SEQ ID NO: 5620 - DNA, 30 bp, Botrytis hyacinthi; identical to SEQ ID NO: 441
  source 1..30: mol_type = other DNA

SEQ ID NO: 5621 - DNA, 33 bp, Botrytis hyacinthi; identical to SEQ ID NO: 5594
  source 1..33: mol_type = other DNA

SEQ ID NO: 5622 - DNA, 33 bp, Botrytis elliptica
  source 1..33: mol_type = other DNA
tggtgtggacgtcccggacaaccatgtaagcgt

SEQ ID NO: 5623 - DNA, 42 bp, Botrytis hyacinthi
  source 1..42: mol_type = other DNA
tggtgtggacgtcccggacaaccttgcagtgccgttaagcgt

SEQ ID NO: 5624 - DNA, 39 bp, Mytilinidion resinicola
  source 1..39: mol_type = other DNA
tgtcatctccccggccagtcttgcagcaaggataagcgc

SEQ ID NO: 5625 - DNA, 33 bp, Cadophora sp.
  source 1..33: mol_type = other DNA; note = DSE1049
tgtggtcacccaggtcagccttgcggaaagcgt

SEQ ID NO: 5626 - DNA, 30 bp, Botrytis cinerea
  source 1..30: mol_type = other DNA
tttacatggttgtccggggcgtccacacca

SEQ ID NO: 5627 - DNA, 30 bp, Botrytis cinerea; identical to SEQ ID NO: 5626
  source 1..30: mol_type = other DNA

SEQ ID NO: 5628 - DNA, 30 bp, Botrytis cinerea; identical to SEQ ID NO: 5626
  source 1..30: mol_type = other DNA

SEQ ID NO: 5629 - DNA, 30 bp, Botryotinia narcissicola; identical to SEQ ID NO: 5602
  source 1..30: mol_type = other DNA

SEQ ID NO: 5630 - DNA, 30 bp, Botrytis tulipae; identical to SEQ ID NO: 5602
  source 1..30: mol_type = other DNA

SEQ ID NO: 5631 - DNA, 30 bp, Botrytis galanthina; identical to SEQ ID NO: 5602
  source 1..30: mol_type = other DNA

SEQ ID NO: 5632 - DNA, 30 bp, Botryotinia narcissicola; identical to SEQ ID NO: 5567
  source 1..30: mol_type = other DNA

SEQ ID NO: 5633 - DNA, 36 bp, Dothistroma septosporum
  source 1..36: mol_type = other DNA
cgctgcaccgtacccggcctcgcctgcggcaagcgc

SEQ ID NO: 5634 - DNA, 36 bp, Botrytis fragariae
  source 1..36: mol_type = other DNA
ctctctcttgcatggttgtcctgggcgtccgcacca

SEQ ID NO: 5635 - DNA, 33 bp, Botrytis fragariae
  source 1..33: mol_type = other DNA
cttgcggcaaggttgtcctggacgtccgcacca

SEQ ID NO: 5636 - DNA, 42 bp, Ophiocordyceps camponoti-floridani; identical to SEQ ID NO: 5608
  source 1..42: mol_type = other DNA

SEQ ID NO: 5637 - DNA, 33 bp, Botrytis fragariae; identical to SEQ ID NO: 5378
  source 1..33: mol_type = other DNA

SEQ ID NO: 5638 - DNA, 33 bp, Botrytis galanthina; identical to SEQ ID NO: 5468
  source 1..33: mol_type = other DNA

SEQ ID NO: 5639 - DNA, 33 bp, Botrytis cinerea
  source 1..33: mol_type = other DNA
gcgtttacatggttgcccggggcgtccgcacca

SEQ ID NO: 5640 - DNA, 33 bp, Botrytis cinerea; identical to SEQ ID NO: 5639
  source 1..33: mol_type = other DNA

SEQ ID NO: 5641 - DNA, 33 bp, Botrytis cinerea; identical to SEQ ID NO: 5639
  source 1..33: mol_type = other DNA

SEQ ID NO: 5642 - DNA, 42 bp, Ophiocordyceps camponoti-floridani
  source 1..42: mol_type = other DNA
tctcttgactttggggcagatggagttggggcgcttgcacca

SEQ ID NO: 5643 - DNA, 42 bp, Ophiocordyceps camponoti-floridani; identical to SEQ ID NO: 5642
  source 1..42: mol_type = other DNA

SEQ ID NO: 5644 - DNA, 42 bp, Ophiocordyceps camponoti-floridani; identical to SEQ ID NO: 5642
  source 1..42: mol_type = other DNA

SEQ ID NO: 5645 - DNA, 33 bp, Botrytis tulipae
  source 1..33: mol_type = other DNA
tctcttgcatggttgtcctgggcgtccacacca

SEQ ID NO: 5646 - DNA, 33 bp, Dothistroma septosporum
  source 1..33: mol_type = other DNA
tgcactgttccaggtcttgcatgcggaaagcgt

SEQ ID NO: 5647 - DNA, 27 bp, Botrytis hyacinthi
  source 1..27: mol_type = other DNA
tggtgtggacgtcccggacaaccttgc

SEQ ID NO: 5648 - DNA, 27 bp, Botrytis hyacinthi
  source 1..27: mol_type = other DNA
tggtgtggacgtcccggacaaccttgc

SEQ ID NO: 5649 - DNA, 27 bp, Botrytis hyacinthi
  source 1..27: mol_type = other DNA
tggtgtggacgtcccggtcaaccatgt

SEQ ID NO: 5650 - DNA, 30 bp, Botrytis fragariae; identical to SEQ ID NO: 5598
  source 1..30: mol_type = other DNA

SEQ ID NO: 5651 - DNA, 30 bp, Botrytis fragariae; identical to SEQ ID NO: 5598
  source 1..30: mol_type = other DNA

SEQ ID NO: 5652 - DNA, 30 bp, Botrytis cinerea
  source 1..30: mol_type = other DNA
tttgcagggttgtcctgggcgtccacacca

SEQ ID NO: 5653 - DNA, 30 bp, Botrytis cinerea; identical to SEQ ID NO: 5652
  source 1..30: mol_type = other DNA

SEQ ID NO: 5654 - DNA, 30 bp, Botrytis cinerea; identical to SEQ ID NO: 5652
  source 1..30: mol_type = other DNA

SEQ ID NO: 5655 - DNA, 30 bp, Botrytis tulipae; identical to SEQ ID NO: 5567
  source 1..30: mol_type = other DNA

SEQ ID NO: 5656 - DNA, 30 bp, Botrytis galanthina; identical to SEQ ID NO: 5567
  source 1..30: mol_type = other DNA

SEQ ID NO: 5657 - DNA, 36 bp, Dothistroma septosporum
  source 1..36: mol_type = other DNA
cgctgcaccgtccccggtcttgcctgcggtaagcgc

SEQ ID NO: 5658 - DNA, 33 bp, Botrytis fragariae
  source 1..33: mol_type = other DNA
cttgcggcaaggttgtcctgggcgtccgcacca

SEQ ID NO: 5659 - DNA, 33 bp, Botrytis fragariae; identical to SEQ ID NO: 5378
  source 1..33: mol_type = other DNA

SEQ ID NO: 5660 - DNA, 42 bp, Botrytis fragariae; identical to SEQ ID NO: 3622
  source 1..42: mol_type = other DNA

SEQ ID NO: 5661 - DNA, 33 bp, Ophiocordyceps camponoti-floridani
  source 1..33: mol_type = other DNA
ggggccggcatgcggagacggccggaaaagcca

SEQ ID NO: 5662 - DNA, 33 bp, Botrytis galanthina; identical to SEQ ID NO: 5585
  source 1..33: mol_type = other DNA

SEQ ID NO: 5663 - DNA, 33 bp, Botrytis cinerea; identical to SEQ ID NO: 5585
  source 1..33: mol_type = other DNA

SEQ ID NO: 5664 - DNA, 33 bp, Botrytis cinerea; identical to SEQ ID NO: 5585
  source 1..33: mol_type = other DNA

SEQ ID NO: 5665 - DNA, 33 bp, Botrytis cinerea
  source 1..33: mol_type = other DNA
tgcactgttccaggtcttgcttgcggaaagcga

SEQ ID NO: 5666 - DNA, 42 bp, Ophiocordyceps camponoti-floridani
  source 1..42: mol_type = other DNA
tggagcactcgaccatcatctatgagccgacgggcaaagagg

SEQ ID NO: 5667 - DNA, 36 bp, Ophiocordyceps camponoti-floridani
  source 1..36: mol_type = other DNA
tggatccgcatgccgaacagccgctgcccgaggctc

SEQ ID NO: 5668 - DNA, 39 bp, Ophiocordyceps camponoti-floridani
  source 1..39: mol_type = other DNA
tggctgacaagaccgtccccgagatgcagccctcctcgc

SEQ ID NO: 5669 - DNA, 30 bp, Botrytis hyacinthi
  source 1..30: mol_type = other DNA
tggtgtggacgtcccggtcaaccatgtaag

SEQ ID NO: 5670 - DNA, 33 bp, Botrytis hyacinthi
  source 1..33: mol_type = other DNA
tggtgtggacgtcccggtcaaccatgtaagcgt

SEQ ID NO: 5671 - DNA, 30 bp, Botrytis fragariae
  source 1..30: mol_type = other DNA
tttacatggttgtcctgggcgtccgcacca

SEQ ID NO: 5672 - DNA, 30 bp, Botrytis fragariae; identical to SEQ ID NO: 5671
  source 1..30: mol_type = other DNA

SEQ ID NO: 5673 - DNA, 30 bp, Botrytis galanthina
  source 1..30: mol_type = other DNA
tttgcatggttgtcctgggcgtccgcacca

SEQ ID NO: 5674 - DNA, 36 bp, Dothistroma septosporum
  source 1..36: mol_type = other DNA
cgctgcactgtcccaggcctcgcctgcggcaaacga

SEQ ID NO: 5675 - DNA, 33 bp, Botrytis fragariae; identical to SEQ ID NO: 5612
  source 1..33: mol_type = other DNA

SEQ ID NO: 5676 - DNA, 42 bp, Botrytis fragariae; identical to SEQ ID NO: 3622
  source 1..42: mol_type = other DNA

SEQ ID NO: 5677 - DNA, 33 bp, Botrytis fragariae
  source 1..33: mol_type = other DNA
gcgtttacatggttgtcctgggcgtccgcacca

SEQ ID NO: 5678 - DNA, 42 bp, Ophiocordyceps camponoti-floridani; identical to SEQ ID NO: 5642
  source 1..42: mol_type = other DNA

SEQ ID NO: 5679 - DNA, 33 bp, Dothistroma septosporum
  source 1..33: mol_type = other DNA
tgcactgttcctggtcttgcctgcggaaagcga

SEQ ID NO: 5680 - DNA, 30 bp, Botrytis fragariae; identical to SEQ ID NO: 5602
  source 1..30: mol_type = other DNA

SEQ ID NO: 5681 - DNA, 30 bp, Botrytis fragariae; identical to SEQ ID NO: 5602
  source 1..30: mol_type = other DNA

SEQ ID NO: 5682 - DNA, 36 bp, Dothistroma septosporum
  source 1..36: mol_type = other DNA
cgctgcactgtcccaggtctcgcctgtggcaaacgc

SEQ ID NO: 5683 - DNA, 33 bp, Botrytis fragariae; identical to SEQ ID NO: 5378
  source 1..33: mol_type = other DNA

SEQ ID NO: 5684 - DNA, 36 bp, Botrytis fragariae; identical to SEQ ID NO: 5540
  source 1..36: mol_type = other DNA

SEQ ID NO: 5685 - DNA, 36 bp, Botrytis fragariae
  source 1..36: mol_type = other DNA
tatttgtcggcaatccagccctggttcaaggcacca

SEQ ID NO: 5686 - DNA, 27 bp, Ophiocordyceps camponoti-floridani
  source 1..27: mol_type = other DNA
tggcgccaccgtccgaactccgagtgc

SEQ ID NO: 5687 - DNA, 33 bp, Dothistroma septosporum
  source 1..33: mol_type = other DNA
tgtaccgttccaggtcttgcttgtggcaagcgt

SEQ ID NO: 5688 - DNA, 30 bp, Botrytis fragariae; identical to SEQ ID NO: 5567
  source 1..30: mol_type = other DNA

SEQ ID NO: 5689 - DNA, 30 bp, Botrytis fragariae; identical to SEQ ID NO: 5567
  source 1..30: mol_type = other DNA

SEQ ID NO: 5690 - DNA, 36 bp, Dothistroma septosporum
  source 1..36: mol_type = other DNA
cgttgcaccgtgccaggtcttgcatgtggcaagcgt

SEQ ID NO: 5691 - DNA, 33 bp, Botrytis fragariae; identical to SEQ ID NO: 5677
  source 1..33: mol_type = other DNA

SEQ ID NO: 5692 - DNA, 33 bp, Botrytis fragariae; identical to SEQ ID NO: 5585
  source 1..33: mol_type = other DNA

SEQ ID NO: 5693 - DNA, 42 bp, Botrytis fragariae; identical to SEQ ID NO: 3662
  source 1..42: mol_type = other DNA

SEQ ID NO: 5694 - DNA, 33 bp, Dothistroma septosporum
  source 1..33: mol_type = other DNA
tgtactgtcccgggcctcgcctgtggcaagcgg

SEQ ID NO: 5695 - DNA, 33 bp, Botrytis fragariae; identical to SEQ ID NO: 5585
  source 1..33: mol_type = other DNA

SEQ ID NO: 5696 - DNA, 42 bp, Botrytis fragariae; identical to SEQ ID NO: 3662
  source 1..42: mol_type = other DNA

SEQ ID NO: 5697 - DNA, 33 bp, Botrytis fragariae
  source 1..33: mol_type = other DNA
ttgtcggcaatccagccctggttcaaggcacca

SEQ ID NO: 5698 - DNA, 39 bp, Botrytis fragariae
  source 1..39: mol_type = other DNA
tggtgcagttcttctggatctcaatgccgcaaagcttca

SEQ ID NO: 5699 - protein, 30 aa, synthetic construct
  REGION 1..30: note = Synthetic Construct
MGFVLFSQLPSFLLVSTLLLFLVISHSCRA

SEQ ID NO: 5700 - protein, 23 aa, synthetic construct
  REGION 1..23: note = Synthetic Construct
MATTKHLALAILVLLSIGMTTSA

SEQ ID NO: 5701 - protein, 6 aa, synthetic construct
  REGION 1..6: note = Synthetic Construct
QNSQQD

SEQ ID NO: 5702 - protein, 5 aa, synthetic construct
  REGION 1..5: note = Synthetic Construct
QNSQQ

SEQ ID NO: 5703 - protein, 4 aa, synthetic construct
  REGION 1..4: note = Synthetic Construct
QNSQ

SEQ ID NO: 5704 - protein, 9 aa, synthetic construct
  REGION 1..9: note = Synthetic Construct
QNSQQDYLD

SEQ ID NO: 5705 - protein, 7 aa, synthetic construct
  REGION 1..7: note = Synthetic Construct
QNSQQDY

SEQ ID NO: 5706 - protein, 5 aa, synthetic construct
  REGION 1..5: note = Synthetic Construct
RTLLD

SEQ ID NO: 5707 - protein, 49 aa, synthetic construct
  REGION 1..49: note = Synthetic Construct
MGFVLFSQLPSFLLVSTLLLFLVISHSCRAQNSQQDWHWLQLKPGQPMY

SEQ ID NO: 5708 - protein, 48 aa, synthetic construct
  REGION 1..48: note = Synthetic Construct
MGFVLFSQLPSFLLVSTLLLFLVISHSCRAQNSQQWHWLQLKPGQPMY

SEQ ID NO: 5709 - protein, 47 aa, synthetic construct
  REGION 1..47: note = Synthetic Construct
MGFVLFSQLPSFLLVSTLLLFLVISHSCRAQNSQWHWLQLKPGQPMY

SEQ ID NO: 5710 - protein, 43 aa, synthetic construct
  REGION 1..43: note = Synthetic Construct
MGFVLFSQLPSFLLVSTLLLFLVISHSCRAWHWLQLKPGQPMY

SEQ ID NO: 5711 - protein, 59 aa, synthetic construct
  REGION 1..59: note = Synthetic Construct
MGFVLFSQLPSFLLVSTLLLFLVISHSCRAQNSWHWLQLKPGQPMYWHWLQLKPGQPMY

SEQ ID NO: 5712 - protein, 58 aa, synthetic construct
  REGION 1..58: note = Synthetic Construct
MGFVLFSQLPSFLLVSTLLLFLVISHSCRAQNWHWLQLKPGQPMYWHWLQLKPGQPMY

SEQ ID NO: 5713 - protein, 57 aa, synthetic construct
  REGION 1..57: note = Synthetic Construct
MGFVLFSQLPSFLLVSTLLLFLVISHSCRAQWHWLQLKPGQPMYWHWLQLKPGQPMY

SEQ ID NO: 5714 - protein, 56 aa, synthetic construct
  REGION 1..56: note = Synthetic Construct
MGFVLFSQLPSFLLVSTLLLFLVISHSCRAWHWLQLKPGQPMYWHWLQLKPGQPMY

SEQ ID NO: 5715 - protein, 62 aa, synthetic construct
  REGION 1..62: note = Synthetic Construct
MGFVLFSQLPSFLLVSTLLLFLVISHSCRAQWHWLQLKPGQPMYGGGGSWHWLQLKPGQPMY

SEQ ID NO: 5716 - protein, 61 aa, synthetic construct
  REGION 1..61: note = Synthetic Construct
MGFVLFSQLPSFLLVSTLLLFLVISHSCRAWHWLQLKPGQPMYGGGGSWHWLQLKPGQPMY

SEQ ID NO: 5717 - protein, 60 aa, synthetic construct
  REGION 1..60: note = Synthetic Construct
MGFVLFSQLPSFLLVSTLLLFLVISHSCRAQNSQQDYLDWHWLQLKPGQPMYRRRRRRRR

SEQ ID NO: 5718 - protein, 58 aa, synthetic construct
  REGION 1..58: note = Synthetic Construct
MGFVLFSQLPSFLLVSTLLLFLVISHSCRAQNSQQDYWHWLQLKPGQPMYRRRRRRRR

SEQ ID NO: 5719 - protein, 57 aa, synthetic construct
  REGION 1..57: note = Synthetic Construct
MGFVLFSQLPSFLLVSTLLLFLVISHSCRAQNSQQDWHWLQLKPGQPMYRRRRRRRR

SEQ ID NO: 5720 - protein, 51 aa, synthetic construct
  REGION 1..51: note = Synthetic Construct
MGFVLFSQLPSFLLVSTLLLFLVISHSCRAWHWLQLKPGQPMYRRRRRRRR

SEQ ID NO: 5721 - protein, 41 aa, synthetic construct
  REGION 1..41: note = Synthetic Construct
MATTKHLALAILVLLSIGMTTSARTLLDWHWLQLKPGQPMY

SEQ ID NO: 5722 - protein, 38 aa, synthetic construct
  REGION 1..38: note = Synthetic Construct
MATTKHLALAILVLLSIGMTTSARTWHWLQLKPGQPMY

SEQ ID NO: 5723 - protein, 37 aa, synthetic construct
  REGION 1..37: note = Synthetic Construct
MATTKHLALAILVLLSIGMTTSARWHWLQLKPGQPMY

SEQ ID NO: 5724 - protein, 36 aa, synthetic construct
  REGION 1..36: note = Synthetic Construct
MATTKHLALAILVLLSIGMTTSAWHWLQLKPGQPMY

SEQ ID NO: 5725 - protein, 50 aa, synthetic construct
  REGION 1..50: note = Synthetic Construct
MATTKHLALAILVLLSIGMTTSARWHWLQLKPGQPMYWHWLQLKPGQPMY

SEQ ID NO: 5726 - protein, 49 aa, synthetic construct
  REGION 1..49: note = Synthetic Construct
MATTKHLALAILVLLSIGMTTSAWHWLQLKPGQPMYWHWLQLKPGQPMY

SEQ ID NO: 5727 - protein, 55 aa, synthetic construct
  REGION 1..55: note = Synthetic Construct
MATTKHLALAILVLLSIGMTTSARWHWLQLKPGQPMYGGGGSWHWLQLKPGQPMY

SEQ ID NO: 5728 - protein, 54 aa, synthetic construct
  REGION 1..54: note = Synthetic Construct
MATTKHLALAILVLLSIGMTTSAWHWLQLKPGQPMYGGGGSWHWLQLKPGQPMY

SEQ ID NO: 5729 - protein, 46 aa, synthetic construct
  REGION 1..46: note = Synthetic Construct
MATTKHLALAILVLLSIGMTTSARTWHWLQLKPGQPMYRRRRRRRR

SEQ ID NO: 5730 - protein, 45 aa, synthetic construct
  REGION 1..45: note = Synthetic Construct
MATTKHLALAILVLLSIGMTTSARWHWLQLKPGQPMYRRRRRRRR

SEQ ID NO: 5731 - protein, 44 aa, synthetic construct
  REGION 1..44: note = Synthetic Construct
MATTKHLALAILVLLSIGMTTSAWHWLQLKPGQPMYRRRRRRRR

SEQ ID NO: 5732 - DNA, 1816 bp, synthetic construct
  source 1..1816: mol_type = other DNA
gcatggcgcgccgtcgagctgcaggtcaacggatcaggatattcttgtttaagatgttgaactctatggaggtttgtatgaactgatgatctaggaccggataagttcccttcttcatagcgaacttattcaaagaatgttttgtgtatcattcttgttacattgttattaatgaaaaaatattattggtcattggactgaacacgagtgttaaatatggaccaggccccaaataagatccattgatatatgaattaaataacaagaataaatcgagtcaccaaaccacttgccttttttaacgagacttgttcaccaacttgatacaaaagtcattatcctatgcaaatcaataatcatacaaaaatatccaataacactaaaaaattaaaagaaatggataatttcacaatatgttatacgataaagaagttacttttccaagaaattcactgattttataagcccacttgcattagataaatggcaaaaaaaaacaaaaaggaaaagaaataaagcacgaagaattctagaaaatacgaaatacgcttcaatgcagtgggacccacggttcaattattgccaattttcagctccaccgtatatttaaaaaataaaacgataatgctaaaaaaatataaatcgtaacgatcgttaaatctcaacggctggatcttatgacgaccgttagaaattgtggttgtcgacgagtcagtaataaacggcgtcaaagtggttgcagccggcacacacgagtcgtgtttatcaactcaaagcacaaatacttttcctcaacctaaaaataaggcaattagccaaaaacaactttgcgtgtaaacaacgctcaatacacgtgtcattttattattagctattgcttcaccgccttagctttctcgtgacctagtcgtcctcgtcttttcttcttcttcttctataaaacaatacccaaagagctcttcttcttcacaattcagatttcaatttctcaaaatcttaaaaactttctctcaattctctctaccgtgatcaaggtaaatttctgtgttccttattctctcaaaatcttcgattttgttttcgttcgatcccaatttcgtatatgttctttggtttagattctgttaatcttagatcgaacacgattttctgggtttgatcgttagatatcatcttaattctcgattagggtttcatagatatcatccgatttgttcaaataatttgagttttgtcgaataattactcttcgatttgtgatttctatctagatctggtgttagtttctagtttgtgcgatcgaatttgtcgattaatctgagtttttctgattaacaggcctgcaggtagatcgctcgtcgacatggcaaccactaagcaccttgccctcgccatcctggtgctcctttccattggaatgacgacctctgcttggcactggttacaattgaagcctggacagccaatgtatggaggtggaggctcctggcattggctgcaattaaagcccggacaaccaatgtactaaattggtgaccagctcgaatttccccgatcgttcaaacatttggcaataaagtttcttaagattgaatcctgttgccggtcttgcgatgattatcatataatttctgttgaattacgttaagcatgtaataattaacatgtaatgcatgacgttatttatgagatgggtttttatgattagagtcccgcaattatacatttaatacgcgatagaaaacaaaatatagcgcgcaaactaggataaattatcgcgcgcggtgtcatctatgttactagatcccatggatgc

SEQ ID NO: 5733 - DNA, 2548 bp, synthetic construct
  source 1..2548: mol_type = other DNA
gcatggcgcgccgtcgagctgcaggtcaacggatcaggatattcttgtttaagatgttgaactctatggaggtttgtatgaactgatgatctaggaccggataagttcccttcttcatagcgaacttattcaaagaatgttttgtgtatcattcttgttacattgttattaatgaaaaaatattattggtcattggactgaacacgagtgttaaatatggaccaggccccaaataagatccattgatatatgaattaaataacaagaataaatcgagtcaccaaaccacttgccttttttaacgagacttgttcaccaacttgatacaaaagtcattatcctatgcaaatcaataatcatacaaaaatatccaataacactaaaaaattaaaagaaatggataatttcacaatatgttatacgataaagaagttacttttccaagaaattcactgattttataagcccacttgcattagataaatggcaaaaaaaaacaaaaaggaaaagaaataaagcacgaagaattctagaaaatacgaaatacgcttcaatgcagtgggacccacggttcaattattgccaattttcagctccaccgtatatttaaaaaataaaacgataatgctaaaaaaatataaatcgtaacgatcgttaaatctcaacggctggatcttatgacgaccgttagaaattgtggttgtcgacgagtcagtaataaacggcgtcaaagtggttgcagccggcacacacgagtcgtgtttatcaactcaaagcacaaatacttttcctcaacctaaaaataaggcaattagccaaaaacaactttgcgtgtaaacaacgctcaatacacgtgtcattttattattagctattgcttcaccgccttagctttctcgtgacctagtcgtcctcgtcttttcttcttcttcttctataaaacaatacccaaagagctcttcttcttcacaattcagatttcaatttctcaaaatcttaaaaactttctctcaattctctctaccgtgatcaaggtaaatttctgtgttccttattctctcaaaatcttcgattttgttttcgttcgatcccaatttcgtatatgttctttggtttagattctgttaatcttagatcgaacacgattttctgggtttgatcgttagatatcatcttaattctcgattagggtttcatagatatcatccgatttgttcaaataatttgagttttgtcgaataattactcttcgatttgtgatttctatctagatctggtgttagtttctagtttgtgcgatcgaatttgtcgattaatctgagtttttctgattaacaggcctgcaggtagatcgctcgtcgacatggcaaccactaagcaccttgccctcgccatcctggtgctcctttccattggaatgacgacctctgcttggcactggttacaattgaagcctggacagccaatgtatggaggtggaggctcctggcattggctgcaattaaagcccggacaaccaatgtacgactacaaggacgatgatgataaaatggtctccaaaggggaggaggataatatggcaatcatcaaagaatttatgcgttttaaagttcacatggaggggtcagtgaacggtcatgagtttgaaatcgagggggagggagaaggaagaccctatgagggaacccagacggcaaagcttaaagtaaccaaaggaggcccgctgccctttgcttgggatatattatcacctcaatttatgtatggaagcaaagcatatgttaagcatccagcagacattcctgattatctcaaactttctttccccgaaggtttcaagtgggaacgagtgatgaactttgaagacggtggggtcgtgactgtgacacaggattcctcattgcaagacggagagtttatttataaggtcaaactgagaggaactaattttccgtcagacggcccggtgatgcaaaagaagacgatgggttgggaagcaagtagcgagaggatgtaccccgaagatggtgctttgaagggagagataaagcaacgtcttaaattaaaagacgggggtcattacgatgcagaggtcaaaacaacctataaggcaaaaaagcccgtccaactcccaggcgcttacaacgtaaatattaagcttgacataacatctcacaacgaagactacacgattgtggaacagtacgagcgtgccgaaggcaggcattctacgggaggtatggacgaattatacaaataaattggtgaccagctcgaatttccccgatcgttcaaacatttggcaataaagtttcttaagattgaatcctgttgccggtcttgcgatgattatcatataatttctgttgaattacgttaagcatgtaataattaacatgtaatgcatgacgttatttatgagatgggtttttatgattagagtcccgcaattatacatttaatacgcgatagaaaacaaaatatagcgcgcaaactaggataaattatcgcgcgcggtgtcatctatgttactagatcccatggatgc

SEQ ID NO: 5734 - DNA, 2554 bp, synthetic construct
  source 1..2554: mol_type = other DNA
gcatggcgcgccgtcgagctgcaggtcaacggatcaggatattcttgtttaagatgttgaactctatggaggtttgtatgaactgatgatctaggaccggataagttcccttcttcatagcgaacttattcaaagaatgttttgtgtatcattcttgttacattgttattaatgaaaaaatattattggtcattggactgaacacgagtgttaaatatggaccaggccccaaataagatccattgatatatgaattaaataacaagaataaatcgagtcaccaaaccacttgccttttttaacgagacttgttcaccaacttgatacaaaagtcattatcctatgcaaatcaataatcatacaaaaatatccaataacactaaaaaattaaaagaaatggataatttcacaatatgttatacgataaagaagttacttttccaagaaattcactgattttataagcccacttgcattagataaatggcaaaaaaaaacaaaaaggaaaagaaataaagcacgaagaattctagaaaatacgaaatacgcttcaatgcagtgggacccacggttcaattattgccaattttcagctccaccgtatatttaaaaaataaaacgataatgctaaaaaaatataaatcgtaacgatcgttaaatctcaacggctggatcttatgacgaccgttagaaattgtggttgtcgacgagtcagtaataaacggcgtcaaagtggttgcagccggcacacacgagtcgtgtttatcaactcaaagcacaaatacttttcctcaacctaaaaataaggcaattagccaaaaacaactttgcgtgtaaacaacgctcaatacacgtgtcattttattattagctattgcttcaccgccttagctttctcgtgacctagtcgtcctcgtcttttcttcttcttcttctataaaacaatacccaaagagctcttcttcttcacaattcagatttcaatttctcaaaatcttaaaaactttctctcaattctctctaccgtgatcaaggtaaatttctgtgttccttattctctcaaaatcttcgattttgttttcgttcgatcccaatttcgtatatgttctttggtttagattctgttaatcttagatcgaacacgattttctgggtttgatcgttagatatcatcttaattctcgattagggtttcatagatatcatccgatttgttcaaataatttgagttttgtcgaataattactcttcgatttgtgatttctatctagatctggtgttagtttctagtttgtgcgatcgaatttgtcgattaatctgagtttttctgattaacaggcctgcaggtagatcgctcgtcgacatgcctaaaaaaaaaagaaaggtagaagacccctactgctggcactggttacagttaaaaccaggacagccgatgtacggaggaggaggttcttggcactggttgcagctcaagcccggccagccgatgtatgactacaaggacgatgatgataaaatggtctccaaaggggaggaggataatatggcaatcatcaaagaatttatgcgttttaaagttcacatggaggggtcagtgaacggtcatgagtttgaaatcgagggggagggagaaggaagaccctatgagggaacccagacggcaaagcttaaagtaaccaaaggaggcccgctgccctttgcttgggatatattatcacctcaatttatgtatggaagcaaagcatatgttaagcatccagcagacattcctgattatctcaaactttctttccccgaaggtttcaagtgggaacgagtgatgaactttgaagacggtggggtcgtgactgtgacacaggattcctcattgcaagacggagagtttatttataaggtcaaactgagaggaactaattttccgtcagacggcccggtgatgcaaaagaagacgatgggttgggaagcaagtagcgagaggatgtaccccgaagatggtgctttgaagggagagataaagcaacgtcttaaattaaaagacgggggtcattacgatgcagaggtcaaaacaacctataaggcaaaaaagcccgtccaactcccaggcgcttacaacgtaaatattaagcttgacataacatctcacaacgaagactacacgattgtggaacagtacgagcgtgccgaaggcaggcattctacgggaggtatggacgaattatacaaacctaaaaaaaaaagaaaggtagaagacccctactgctaaattggtgaccagctcgaatttccccgatcgttcaaacatttggcaataaagtttcttaagattgaatcctgttgccggtcttgcgatgattatcatataatttctgttgaattacgttaagcatgtaataattaacatgtaatgcatgacgttatttatgagatgggtttttatgattagagtcccgcaattatacatttaatacgcgatagaaaacaaaatatagcgcgcaaactaggataaattatcgcgcgcggtgtcatctatgttactagatcccatggatgc

SEQ ID NO: 5735 - DNA, 2581 bp, synthetic construct
  source 1..2581: mol_type = other DNA
gcatggcgcgccgtcgagctgcaggtcaacggatcaggatattcttgtttaagatgttgaactctatggaggtttgtatgaactgatgatctaggaccggataagttcccttcttcatagcgaacttattcaaagaatgttttgtgtatcattcttgttacattgttattaatgaaaaaatattattggtcattggactgaacacgagtgttaaatatggaccaggccccaaataagatccattgatatatgaattaaataacaagaataaatcgagtcaccaaaccacttgccttttttaacgagacttgttcaccaacttgatacaaaagtcattatcctatgcaaatcaataatcatacaaaaatatccaataacactaaaaaattaaaagaaatggataatttcacaatatgttatacgataaagaagttacttttccaagaaattcactgattttataagcccacttgcattagataaatggcaaaaaaaaacaaaaaggaaaagaaataaagcacgaagaattctagaaaatacgaaatacgcttcaatgcagtgggacccacggttcaattattgccaattttcagctccaccgtatatttaaaaaataaaacgataatgctaaaaaaatataaatcgtaacgatcgttaaatctcaacggctggatcttatgacgaccgttagaaattgtggttgtcgacgagtcagtaataaacggcgtcaaagtggttgcagccggcacacacgagtcgtgtttatcaactcaaagcacaaatacttttcctcaacctaaaaataaggcaattagccaaaaacaactttgcgtgtaaacaacgctcaatacacgtgtcattttattattagctattgcttcaccgccttagctttctcgtgacctagtcgtcctcgtcttttcttcttcttcttctataaaacaatacccaaagagctcttcttcttcacaattcagatttcaatttctcaaaatcttaaaaactttctctcaattctctctaccgtgatcaaggtaaatttctgtgttccttattctctcaaaatcttcgattttgttttcgttcgatcccaatttcgtatatgttctttggtttagattctgttaatcttagatcgaacacgattttctgggtttgatcgttagatatcatcttaattctcgattagggtttcatagatatcatccgatttgttcaaataatttgagttttgtcgaataattactcttcgatttgtgatttctatctagatctggtgttagtttctagtttgtgcgatcgaatttgtcgattaatctgagtttttctgattaacaggcctgcaggtagatcgctcgtcgacatgcctaaaaaaaaaagaaaggtagaagacccctactgcgactacaaggacgatgatgataaagtctccaaaggggaggaggataatatggcaatcatcaaagaatttatgcgttttaaagttcacatggaggggtcagtgaacggtcatgagtttgaaatcgagggggagggagaaggaagaccctatgagggaacccagacggcaaagcttaaagtaaccaaaggaggcccgctgccctttgcttgggatatattatcacctcaatttatgtatggaagcaaagcatatgttaagcatccagcagacattcctgattatctcaaactttctttccccgaaggtttcaagtgggaacgagtgatgaactttgaagacggtggggtcgtgactgtgacacaggattcctcattgcaagacggagagtttatttataaggtcaaactgagaggaactaattttccgtcagacggcccggtgatgcaaaagaagacgatgggttgggaagcaagtagcgagaggatgtaccccgaagatggtgctttgaagggagagataaagcaacgtcttaaattaaaagacgggggtcattacgatgcagaggtcaaaacaacctataaggcaaaaaagcccgtccaactcccaggcgcttacaacgtaaatattaagcttgacataacatctcacaacgaagactacacgattgtggaacagtacgagcgtgccgaaggcaggcattctacgggaggtatggacgaattatacaaagggtctggcgcaaccaacttctcactcttaaagcaggctggtgatgtcgaggaaaatccaggcccgtggcactggttacagttaaaaccaggacagccgatgtacggaggaggaggttcttggcactggttgcagctcaagcccggccagccgatgtattaaattggtgaccagctcgaatttccccgatcgttcaaacatttggcaataaagtttcttaagattgaatcctgttgccggtcttgcgatgattatcatataatttctgttgaattacgttaagcatgtaataattaacatgtaatgcatgacgttatttatgagatgggtttttatgattagagtcccgcaattatacatttaatacgcgatagaaaacaaaatatagcgcgcaaactaggataaattatcgcgcgcggtgtcatctatgttactagatcccatggatgc

SEQ ID NO: 5736 - protein, 9 aa, synthetic construct
RKKRRQRRR

SEQ ID NO: 5737 - protein, 11 aa, synthetic construct
KKLFKKILKYL

SEQ ID NO: 5738 - protein, 9 aa, synthetic construct
  SITE 1..9: note = D-arginine
RRRRRRRRR

SEQ ID NO: 5739 - protein, 18 aa, synthetic construct
KALKKLLAKWLAAAKALL

SEQ ID NO: 5740 - protein, 14 aa, synthetic construct
LLLFLLKKRKKRKY

SEQ ID NO: 5741 - protein, 23 aa, synthetic construct
SYFILRRRRKRFPYFFTDVRVAA

SEQ ID NO: 5742 - protein, 13 aa, synthetic construct
KMDCRWRWKCCKK

SEQ ID NO: 5743 - protein, 10 aa, synthetic construct
CRWRWKCCKK

SEQ ID NO: 5744 - protein, 15 aa, synthetic construct
FLGKKFKKYFLQLLK

SEQ ID NO: 5745 - protein, 16 aa, synthetic construct
KTVLLRKLLKLLVRKI

SEQ ID NO: 5746 - protein, 23 aa, synthetic construct
GIGKFLHSAKKWGKAFVGQIMNC

SEQ ID NO: 5747 - protein, 8 aa, synthetic construct
RRRRRRRR

SEQ ID NO: 5748 - protein, 9 aa, synthetic construct
RRRRRRRRR

SEQ ID NO: 5749 - protein, 8 aa, synthetic construct
KKKKKKKK

SEQ ID NO: 5750 - protein, 18 aa, synthetic construct
WCTWKGQPCWRRRRRRRR

SEQ ID NO: 5751 - protein, 17 aa, synthetic construct
WCGRPGQPCRRRRRRRR

SEQ ID NO: 5752 - protein, 21 aa, synthetic construct
WHWLQLKPGQPMYRRRRRRRR

SEQ ID NO: 5753 - protein, 21 aa, synthetic construct
WKMGQYHQLPPLWRRRRRRRR

SEQ ID NO: 5754 - protein, 22 aa, synthetic construct
WHWLQLKPGQPMYGRRRRRRRR

SEQ ID NO: 5755 - protein, 22 aa, synthetic construct
GWHWLQLKPGQPMYRRRRRRRR

SEQ ID NO: 5756 - protein, 19 aa, synthetic construct
WCTWKGQPCWRRRRRRRRR

SEQ ID NO: 5757 - protein, 18 aa, synthetic construct
WCGRPGQPCRRRRRRRRR

SEQ ID NO: 5758 - protein, 22 aa, synthetic construct
WHWLQLKPGQPMYRRRRRRRRR

SEQ ID NO: 5759 - protein, 22 aa, synthetic construct
WKMGQYHQLPPLWRRRRRRRRR

SEQ ID NO: 5760 - protein, 23 aa, synthetic construct
WHWLQLKPGQPMYGRRRRRRRRR

SEQ ID NO: 5761 - protein, 23 aa, synthetic construct
GWHWLQLKPGQPMYRRRRRRRRR

SEQ ID NO: 5762 - protein, 18 aa, synthetic construct
WCTWKGQPCWKKKKKKKK

SEQ ID NO: 5763 - protein, 17 aa, synthetic construct
WCGRPGQPCKKKKKKKK

SEQ ID NO: 5764 - protein, 21 aa, synthetic construct
WHWLQLKPGQPMYKKKKKKKK

SEQ ID NO: 5765 - protein, 21 aa, synthetic construct
WKMGQYHQLPPLWKKKKKKKK

SEQ ID NO: 5766 - protein, 22 aa, synthetic construct
WHWLQLKPGQPMYGKKKKKKKK

SEQ ID NO: 5767 - protein, 22 aa, synthetic construct
GWHWLQLKPGQPMYKKKKKKKK

SEQ ID NO: 5768 - protein, 19 aa, synthetic construct
WCTWKGQPCWRKKRRQRRR

SEQ ID NO: 5769 - protein, 18 aa, synthetic construct
WCGRPGQPCRKKRRQRRR

SEQ ID NO: 5770 - protein, 22 aa, synthetic construct
WHWLQLKPGQPMYRKKRRQRRR

SEQ ID NO: 5771 - protein, 22 aa, synthetic construct
WKMGQYHQLPPLWRKKRRQRRR

SEQ ID NO: 5772 - protein, 23 aa, synthetic construct
WHWLQLKPGQPMYGRKKRRQRRR

SEQ ID NO: 5773 - protein, 23 aa, synthetic construct
GWHWLQLKPGQPMYRKKRRQRRR

SEQ ID NO: 5774 - protein, 21 aa, synthetic construct
WCTWKGQPCWKKLFKKILKYL

SEQ ID NO: 5775 - protein, 20 aa, synthetic construct
WCGRPGQPCKKLFKKILKYL

SEQ ID NO: 5776 - protein, 24 aa, synthetic construct
WHWLQLKPGQPMYKKLFKKILKYL

SEQ ID NO: 5777 - protein, 24 aa, synthetic construct
WKMGQYHQLPPLWKKLFKKILKYL

SEQ ID NO: 5778 - protein, 25 aa, synthetic construct
WHWLQLKPGQPMYGKKLFKKILKYL

SEQ ID NO: 5779 - protein, 25 aa, synthetic construct
GWHWLQLKPGQPMYKKLFKKILKYL

SEQ ID NO: 5780 - protein, 19 aa, synthetic construct
  SITE 11..19: note = D-arginine
WCTWKGQPCWRRRRRRRRR

SEQ ID NO: 5781 - protein, 18 aa, synthetic construct
  SITE 10..18: note = D-arginine
WCGRPGQPCRRRRRRRRR

SEQ ID NO: 5782 - protein, 22 aa, synthetic construct
  SITE 14..22: note = D-arginine
WHWLQLKPGQPMYRRRRRRRRR

SEQ ID NO: 5783 - protein, 22 aa, synthetic construct
  SITE 14..22: note = D-arginine
WKMGQYHQLPPLWRRRRRRRRR

SEQ ID NO: 5784 - protein, 23 aa, synthetic construct
  SITE 15..23: note = D-arginine
WHWLQLKPGQPMYGRRRRRRRRR

SEQ ID NO: 5785 - protein, 23 aa, synthetic construct
  SITE 15..23: note = D-arginine
GWHWLQLKPGQPMYRRRRRRRRR

SEQ ID NO: 5786 - protein, 28 aa, synthetic construct
WCTWKGQPCWKALKKLLAKWLAAAKALL

SEQ ID NO: 5787 - protein, 27 aa, synthetic construct
WCGRPGQPCKALKKLLAKWLAAAKALL

SEQ ID NO: 5788 - protein, 31 aa, synthetic construct
WHWLQLKPGQPMYKALKKLLAKWLAAAKALL

SEQ ID NO: 5789 - protein, 31 aa, synthetic construct
WKMGQYHQLPPLWKALKKLLAKWLAAAKALL

SEQ ID NO: 5790 - protein, 32 aa, synthetic construct
WHWLQLKPGQPMYGKALKKLLAKWLAAAKALL

SEQ ID NO: 5791 - protein, 32 aa, synthetic construct
GWHWLQLKPGQPMYKALKKLLAKWLAAAKALL

SEQ ID NO: 5792 - protein, 24 aa, synthetic construct
WCTWKGQPCWLLLFLLKKRKKRKY

SEQ ID NO: 5793 - protein, 23 aa, synthetic construct
WCGRPGQPCLLLFLLKKRKKRKY

SEQ ID NO: 5794 - protein, 27 aa, synthetic construct
WHWLQLKPGQPMYLLLFLLKKRKKRKY

SEQ ID NO: 5795 - protein, 27 aa, synthetic construct
WKMGQYHQLPPLWLLLFLLKKRKKRKY

SEQ ID NO: 5796 - protein, 28 aa, synthetic construct
WHWLQLKPGQPMYGLLLFLLKKRKKRKY

SEQ ID NO: 5797 - protein, 28 aa, synthetic construct
GWHWLQLKPGQPMYLLLFLLKKRKKRKY

SEQ ID NO: 5798 - protein, 33 aa, synthetic construct
WCTWKGQPCWSYFILRRRRKRFPYFFTDVRVAA

SEQ ID NO: 5799 - protein, 32 aa, synthetic construct
WCGRPGQPCSYFILRRRRKRFPYFFTDVRVAA

SEQ ID NO: 5800 - protein, 36 aa, synthetic construct
WHWLQLKPGQPMYSYFILRRRRKRFPYFFTDVRVAA

SEQ ID NO: 5801 - protein, 36 aa, synthetic construct
WKMGQYHQLPPLWSYFILRRRRKRFPYFFTDVRVAA

SEQ ID NO: 5802 - protein, 37 aa, synthetic construct
WHWLQLKPGQPMYGSYFILRRRRKRFPYFFTDVRVAA

SEQ ID NO: 5803 - protein, 37 aa, synthetic construct
GWHWLQLKPGQPMYSYFILRRRRKRFPYFFTDVRVAA

SEQ ID NO: 5804 - protein, 23 aa, synthetic construct
WCTWKGQPCWKMDCRWRWKCCKK

SEQ ID NO: 5805 - protein, 22 aa, synthetic construct
WCGRPGQPCKMDCRWRWKCCKK

SEQ ID NO: 5806 - protein, 26 aa, synthetic construct
WHWLQLKPGQPMYKMDCRWRWKCCKK

SEQ ID NO: 5807 - protein, 26 aa, synthetic construct
WKMGQYHQLPPLWKMDCRWRWKCCKK

SEQ ID NO: 5808 - protein, 27 aa, synthetic construct
WHWLQLKPGQPMYGKMDCRWRWKCCKK

SEQ ID NO: 5809 - protein, 27 aa, synthetic construct
GWHWLQLKPGQPMYKMDCRWRWKCCKK

SEQ ID NO: 5810 - protein, 20 aa, synthetic construct
WCTWKGQPCWCRWRWKCCKK

SEQ ID NO: 5811 - protein, 19 aa, synthetic construct
WCGRPGQPCCRWRWKCCKK

SEQ ID NO: 5812 - protein, 23 aa, synthetic construct
WHWLQLKPGQPMYCRWRWKCCKK

SEQ ID NO: 5813 - protein, 23 aa, synthetic construct
WKMGQYHQLPPLWCRWRWKCCKK

SEQ ID NO: 5814 - protein, 24 aa, synthetic construct
WHWLQLKPGQPMYGCRWRWKCCKK

SEQ ID NO: 5815 - protein, 24 aa, synthetic construct
GWHWLQLKPGQPMYCRWRWKCCKK

SEQ ID NO: 5816 - protein, 25 aa, synthetic construct
WCTWKGQPCWFLGKKFKKYFLQLLK

SEQ ID NO: 5817 - protein, 24 aa, synthetic construct
WCGRPGQPCFLGKKFKKYFLQLLK

SEQ ID NO: 5818 - protein, 28 aa, synthetic construct
WHWLQLKPGQPMYFLGKKFKKYFLQLLK

SEQ ID NO: 5819 - protein, 28 aa, synthetic construct
WKMGQYHQLPPLWFLGKKFKKYFLQLLK

SEQ ID NO: 5820 - protein, 29 aa, synthetic construct
WHWLQLKPGQPMYGFLGKKFKKYFLQLLK

SEQ ID NO: 5821 - protein, 29 aa, synthetic construct
GWHWLQLKPGQPMYFLGKKFKKYFLQLLK

SEQ ID NO: 5822 - protein, 26 aa, synthetic construct
WCTWKGQPCWKTVLLRKLLKLLVRKI

SEQ ID NO: 5823 - protein, 25 aa, synthetic construct
WCGRPGQPCKTVLLRKLLKLLVRKI

SEQ ID NO: 5824 - protein, 29 aa, synthetic construct
WHWLQLKPGQPMYKTVLLRKLLKLLVRKI

SEQ ID NO: 5825 - protein, 29 aa, synthetic construct
WKMGQYHQLPPLWKTVLLRKLLKLLVRKI

SEQ ID NO: 5826 - protein, 30 aa, synthetic construct
WHWLQLKPGQPMYGKTVLLRKLLKLLVRKI

SEQ ID NO: 5827 - protein, 30 aa, synthetic construct
GWHWLQLKPGQPMYKTVLLRKLLKLLVRKI

SEQ ID NO: 5828 - protein, 33 aa, synthetic construct
WCTWKGQPCWGIGKFLHSAKKWGKAFVGQIMNC

SEQ ID NO: 5829 - protein, 32 aa, synthetic construct
WCGRPGQPCGIGKFLHSAKKWGKAFVGQIMNC

SEQ ID NO: 5830 - protein, 36 aa, synthetic construct
WHWLQLKPGQPMYGIGKFLHSAKKWGKAFVGQIMNC

SEQ ID NO: 5831 - protein, 36 aa, synthetic construct
WKMGQYHQLPPLWGIGKFLHSAKKWGKAFVGQIMNC

SEQ ID NO: 5832 - protein, 37 aa, synthetic construct
WHWLQLKPGQPMYGGIGKFLHSAKKWGKAFVGQIMNC

SEQ ID NO: 5833 - protein, 37 aa, synthetic construct
GWHWLQLKPGQPMYGIGKFLHSAKKWGKAFVGQIMNC

SEQ ID NO: 5834 - protein, 4 aa, synthetic construct
GGGG

SEQ ID NO: 5835 - protein, 20 aa, synthetic construct
WCTWKGQPCWWCTWKGQPCW

SEQ ID NO: 5836 - protein, 18 aa, synthetic construct
WCGRPGQPCWCGRPGQPC

SEQ ID NO: 5837 - protein, 30 aa, Saccharomyces cerevisiae
WHWLQLKPGQPMYGGGGWHWLQLKPGQPMY

SEQ ID NO: 5838 - protein, 26 aa, synthetic construct
WKMGQYHQLPPLWWKMGQYHQLPPLW

SEQ ID NO: 5839 - protein, 28 aa, synthetic construct
WHWLQLKPGQPMYGWHWLQLKPGQPMYG

SEQ ID NO: 5840 - protein, 28 aa, synthetic construct
GWHWLQLKPGQPMYGWHWLQLKPGQPMY

SEQ ID NO: 5841 - protein, 24 aa, synthetic construct
WCTWKGQPCWGGGGWCTWKGQPCW

SEQ ID NO: 5842 - protein, 22 aa, synthetic construct
WCGRPGQPCGGGGWCGRPGQPC

SEQ ID NO: 5843 - protein, 30 aa, synthetic construct
WKMGQYHQLPPLWGGGGWKMGQYHQLPPLW

SEQ ID NO: 5844 - protein, 32 aa, synthetic construct
WHWLQLKPGQPMYGGGGGWHWLQLKPGQPMYG

SEQ ID NO: 5845 - protein, 32 aa, synthetic construct
GWHWLQLKPGQPMYGGGGGWHWLQLKPGQPMY

SEQ ID NO: 5846 - protein, 26 aa, synthetic construct
WCTWKGQPCWQNSQQDWCTWKGQPCW

SEQ ID NO: 5847 - protein, 24 aa, synthetic construct
WCGRPGQPCQNSQQDWCGRPGQPC

SEQ ID NO: 5848 - protein, 32 aa, synthetic construct
WHWLQLKPGQPMYQNSQQDWHWLQLKPGQPMY

SEQ ID NO: 5849 - protein, 32 aa, synthetic construct
WKMGQYHQLPPLWQNSQQDWKMGQYHQLPPLW

SEQ ID NO: 5850 - protein, 34 aa, synthetic construct
WHWLQLKPGQPMYGQNSQQDWHWLQLKPGQPMYG

SEQ ID NO: 5851 - protein, 34 aa, synthetic construct
GWHWLQLKPGQPMYQNSQQDGWHWLQLKPGQPMY

SEQ ID NO: 5852 - protein, 25 aa, synthetic construct
WCTWKGQPCWQNSQQWCTWKGQPCW

SEQ ID NO: 5853 - protein, 23 aa, synthetic construct
WCGRPGQPCQNSQQWCGRPGQPC

SEQ ID NO: 5854 - protein, 31 aa, synthetic construct
WHWLQLKPGQPMYQNSQQWHWLQLKPGQPMY

SEQ ID NO: 5855 - protein, 31 aa, synthetic construct
WKMGQYHQLPPLWQNSQQWKMGQYHQLPPLW

SEQ ID NO: 5856 - protein, 33 aa, synthetic construct
WHWLQLKPGQPMYGQNSQQWHWLQLKPGQPMYG

SEQ ID NO: 5857 - protein, 33 aa, synthetic construct
GWHWLQLKPGQPMYQNSQQGWHWLQLKPGQPMY

SEQ ID NO: 5858 - protein, 24 aa, synthetic construct
WCTWKGQPCWQNSQWCTWKGQPCW

SEQ ID NO: 5859 - protein, 22 aa, synthetic construct
WCGRPGQPCQNSQWCGRPGQPC

SEQ ID NO: 5860 - protein, 30 aa, synthetic construct
WHWLQLKPGQPMYQNSQWHWLQLKPGQPMY

SEQ ID NO: 5861 - protein, 30 aa, synthetic construct
WKMGQYHQLPPLWQNSQWKMGQYHQLPPLW

SEQ ID NO: 5862 - protein, 32 aa, synthetic construct
WHWLQLKPGQPMYGQNSQWHWLQLKPGQPMYG

SEQ ID NO: 5863 - protein, 32 aa, synthetic construct
GWHWLQLKPGQPMYQNSQGWHWLQLKPGQPMY

SEQ ID NO: 5864 - protein, 23 aa, synthetic construct
WCTWKGQPCWQNSWCTWKGQPCW

SEQ ID NO: 5865 - protein, 21 aa, synthetic construct
WCGRPGQPCQNSWCGRPGQPC

SEQ ID NO: 5866 - protein, 29 aa, synthetic construct
WHWLQLKPGQPMYQNSWHWLQLKPGQPMY

SEQ ID NO: 5867 - protein, 29 aa, synthetic construct
WKMGQYHQLPPLWQNSWKMGQYHQLPPLW

SEQ ID NO: 5868 - protein, 31 aa, synthetic construct
WHWLQLKPGQPMYGQNSWHWLQLKPGQPMYG

SEQ ID NO: 5869 - protein, 31 aa, synthetic construct
GWHWLQLKPGQPMYQNSGWHWLQLKPGQPMY

SEQ ID NO: 5870 - protein, 22 aa, synthetic construct
WCTWKGQPCWQNWCTWKGQPCW

SEQ ID NO: 5871 - protein, 20 aa, synthetic construct
WCGRPGQPCQNWCGRPGQPC

SEQ ID NO: 5872 - protein, 28 aa, synthetic construct
WHWLQLKPGQPMYQNWHWLQLKPGQPMY

SEQ ID NO: 5873 - protein, 28 aa, synthetic construct
WKMGQYHQLPPLWQNWKMGQYHQLPPLW

SEQ ID NO: 5874 - protein, 30 aa, synthetic construct
WHWLQLKPGQPMYGQNWHWLQLKPGQPMYG

SEQ ID NO: 5875 - protein, 30 aa, synthetic construct
GWHWLQLKPGQPMYQNGWHWLQLKPGQPMY

SEQ ID NO: 5876 - protein, 21 aa, synthetic construct
WCTWKGQPCWQWCTWKGQPCW

SEQ ID NO: 5877 - protein, 19 aa, synthetic construct
WCGRPGQPCQWCGRPGQPC

SEQ ID NO: 5878 - protein, 27 aa, synthetic construct
WHWLQLKPGQPMYQWHWLQLKPGQPMY

SEQ ID NO: 5879 - protein, 27 aa, synthetic construct
WKMGQYHQLPPLWQWKMGQYHQLPPLW

SEQ ID NO: 5880 - protein, 29 aa, synthetic construct
WHWLQLKPGQPMYGQWHWLQLKPGQPMYG

SEQ ID NO: 5881 - protein, 29 aa, synthetic construct
GWHWLQLKPGQPMYQGWHWLQLKPGQPMY

SEQ ID NO: 5882 - protein, 29 aa, synthetic construct
WCTWKGQPCWQNSQQDYLDWCTWKGQPCW

SEQ ID NO: 5883 - protein, 27 aa, synthetic construct
WCGRPGQPCQNSQQDYLDWCGRPGQPC

SEQ ID NO: 5884 - protein, 35 aa, synthetic construct
WHWLQLKPGQPMYQNSQQDYLDWHWLQLKPGQPMY

SEQ ID NO: 5885 - protein, 35 aa, synthetic construct
WKMGQYHQLPPLWQNSQQDYLDWKMGQYHQLPPLW

SEQ ID NO: 5886 - protein, 37 aa, synthetic construct
WHWLQLKPGQPMYGQNSQQDYLDWHWLQLKPGQPMYG

SEQ ID NO: 5887 - protein, 37 aa, synthetic construct
GWHWLQLKPGQPMYQNSQQDYLDGWHWLQLKPGQPMY

SEQ ID NO: 5888 - protein, 27 aa, synthetic construct
WCTWKGQPCWQNSQQDYWCTWKGQPCW

SEQ ID NO: 5889 - protein, 25 aa, synthetic construct
WCGRPGQPCQNSQQDYWCGRPGQPC

SEQ ID NO: 5890 - protein, 33 aa, synthetic construct
WHWLQLKPGQPMYQNSQQDYWHWLQLKPGQPMY

SEQ ID NO: 5891 - protein, 33 aa, synthetic construct
WKMGQYHQLPPLWQNSQQDYWKMGQYHQLPPLW

SEQ ID NO: 5892 - protein, 35 aa, synthetic construct
WHWLQLKPGQPMYGQNSQQDYWHWLQLKPGQPMYG

SEQ ID NO: 5893 - protein, 35 aa, synthetic construct
GWHWLQLKPGQPMYQNSQQDYGWHWLQLKPGQPMY

SEQ ID NO: 5894 - protein, 25 aa, synthetic construct
WCTWKGQPCWRTLLDWCTWKGQPCW

SEQ ID NO: 5895 - protein, 23 aa, synthetic construct
WCGRPGQPCRTLLDWCGRPGQPC

SEQ ID NO: 5896 - protein, 31 aa, synthetic construct
WHWLQLKPGQPMYRTLLDWHWLQLKPGQPMY

SEQ ID NO: 5897 - protein, 31 aa, synthetic construct
WKMGQYHQLPPLWRTLLDWKMGQYHQLPPLW

SEQ ID NO: 5898 - protein, 33 aa, synthetic construct
WHWLQLKPGQPMYGRTLLDWHWLQLKPGQPMYG

SEQ ID NO: 5899 - protein, 33 aa, synthetic construct
GWHWLQLKPGQPMYRTLLDGWHWLQLKPGQPMY

SEQ ID NO: 5900 - protein, 22 aa, synthetic construct
WCTWKGQPCWRTWCTWKGQPCW

SEQ ID NO: 5901 - protein, 20 aa, synthetic construct
WCGRPGQPCRTWCGRPGQPC

SEQ ID NO: 5902 - protein, 28 aa, synthetic construct
WHWLQLKPGQPMYRTWHWLQLKPGQPMY

SEQ ID NO: 5903 - protein, 28 aa, synthetic construct
WKMGQYHQLPPLWRTWKMGQYHQLPPLW

SEQ ID NO: 5904 - protein, 30 aa, synthetic construct
WHWLQLKPGQPMYGRTWHWLQLKPGQPMYG

SEQ ID NO: 5905 - protein, 30 aa, synthetic construct
GWHWLQLKPGQPMYRTGWHWLQLKPGQPMY

SEQ ID NO: 5906 - protein, 21 aa, synthetic construct
WCTWKGQPCWRWCTWKGQPCW

SEQ ID NO: 5907 - protein, 19 aa, synthetic construct
WCGRPGQPCRWCGRPGQPC

SEQ ID NO: 5908 - protein, 27 aa, synthetic construct
WHWLQLKPGQPMYRWHWLQLKPGQPMY

SEQ ID NO: 5909 - protein, 27 aa, synthetic construct
WKMGQYHQLPPLWRWKMGQYHQLPPLW

SEQ ID NO: 5910 - protein, 29 aa, synthetic construct
WHWLQLKPGQPMYGRWHWLQLKPGQPMYG

SEQ ID NO: 5911 - protein, 29 aa, synthetic construct
GWHWLQLKPGQPMYRGWHWLQLKPGQPMY